(19) United States
(12) Patent Application Publication
(10) Pub. No.: US 2021/0355502 A1
(43) Pub. Date: Nov. 18, 2021

(54) MATERIALS AND METHODS FOR THE CORRECTION OF RETINITIS PIGMENTOSA

(71) Applicant: BLUEALLELE, LLC, Maple Grove, MN (US)

(72) Inventor: Nicholas BALTES, Maple Grove, MN (US)

(21) Appl. No.: 17/273,724

(22) PCT Filed: Oct. 2, 2019
(86) PCT No.: PCT/US2019/054294

§ 371 Date: Mar. 4, 2021

Related U.S. Application Data
(60) Provisional application No. 62/830,756, filed on Apr. 8, 2019.
(60) Provisional application No. 62/741,368, filed on Oct. 4, 2018.

(51) Int. Cl. C12N 15/86; C12N 9/22; C12N 15/90

(52) U.S. Cl. CPC C12N 15/86; C12N 9/22; C12N 15/907; A61K 47/6929; C12N 2830/008; C12N 2750/14143; C12N 2830/002

(57) ABSTRACT

Methods and compositions for modifying the coding sequence of endogenous genes using rare-cutting endonucleases. The methods and compositions described herein can be used to modify the endogenous USH2A gene.

### REFERENCE TO RELATED APPLICATIONS

[0001] This application claims priority to previously filed and co-pending applications U.S. Ser. No. 62/741,368, filed Oct. 4, 2018 and U.S. Ser. No. 62/830,756, filed Apr. 8, 2019, the contents of which are incorporated herein by reference in their entirety.

### SEQUENCE LISTING

[0002] The instant application contains a Sequence Listing which has been submitted in ASCI format via EFS-Web and is hereby incorporated by reference in its entirety. Said ASCII copy, created on Oct. 1, 2019, is named SEQUENCE_LISTING_BA2018-3WO and is 1,286,144 bytes in size.

### TECHNICAL FIELD

[0003] The present document is in the field of gene therapy and genome editing.

[0004] More specifically, this document relates to the targeted modification of endogenous genes, including the usherin gene, USH2A.

### BACKGROUND

[0005] Monogenic disorders are caused by one or more mutations in a single gene, examples of which include sickle cell disease (hemoglobin-beta gene), cystic fibrosis (cystic fibrosis transmembrane conductance regulator gene), and Tay-Sachs disease (beta-hexosaminidase A gene). Monogenic disorders have been an interest for gene therapy, as replacement of the defective gene with a functional copy could provide therapeutic benefits. However, one bottleneck for generating effective therapies includes the size of the functional copy of the gene. Many delivery methods, including those that use viruses, have size limitations which hinder the delivery of large transgenes. Further, many genes have alternative splicing patterns resulting in a single gene coding for multiple proteins. Methods to correct partial regions of a defective gene may provide an alternative means to treat monogenic disorders.

[0006] Usher syndrome is an autosomal recessive genetic disorder which causes both retinitis pigmentosa and sensorineural hearing loss, with a prevalence estimated between 3.3 and 6.4 per 100,000 people. Usher syndrome can be divided into three clinical subtypes, depending on severity and onset of symptoms: Usher syndrome type I, Usher type II, and Usher type III. The most common cause of Usher syndrome is caused by mutations in the USH2A gene (75-90% of patients with USH2 have pathogenic mutations in the USH2A gene).

[0007] The structure of the USH2A gene, along with the location of pathogenic mutations, have created challenges for generating therapies. The USH2A gene is a relatively large gene, spanning 790 kb and comprising 72 exons. The coding sequence is approximately 15,609 bp, making it too large for current delivery vehicles (e.g., adeno-associated viral vectors). Further, the gene encodes multiple isoforms (Wijk et al., Am. J. Hum. Genet. 74:738-744, 2004), including usherin isoform A (encoded by exons 1-21) and usherin isoform B (encoded by exons 1-72). More than 70 different USH2A alleles harboring pathogenic mutations have been identified (Baux et al., Hum Matat 29:76-87, 2008). Within this study, most of the mutations were present in only one or a few cases, with the exception of the mutation c.2299delG (Glu767fs).

[0008] As there are no current treatments available for patients with USH2, development of methods and materials for correcting defective USH2A genes could provide therapeutic options for those with USH2 retinitis pigmentosa.

### SUMMARY

[0009] Several challenges exist with developing effective, safe and robust therapies for Usher syndrome type II. Many of these challenges exist due to the complexity of the USH2A gene. USH2A is a relatively large gene, spanning 790 kb and comprising 72 exons. The coding sequence is approximately 15,609 bp, making it too large for most delivery vehicles (e.g., adeno-associated virus vectors for gene augmentation). The gene encodes multiple isoforms, including usherin isoform A (encoded by exons 1-21) and usherin isoform B (encoded by exons 1-72), and mutations causing USH2 are distributed across the coding sequence of both isoforms. This document provides novel approaches for modifying the USH2A gene.

[0010] This disclosure herein describes novel approaches for creating effective therapies for retinitis pigmentosa while addressing the challenges associated with the USH2A gene. Further, the methods are compatible with current delivery vehicles (e.g., adeno-associated viruses) and enable correction of mutations throughout the USH2A gene while accounting for the production of both isoforms (isoform a and isoform b) and expression levels of each. This disclosure herein is based at least in part on the discovery that a portion of the coding sequence of the USH2A gene can be substituted with a coding sequence on a transgene. The methods described herein provide a means for introducing sequence changes spanning multiple exons while maintaining the production of both isoforms. For example, the methods teach how to modify the coding sequence spanning from exon 1 up to exon 21 of the endogenous USH2A gene, or any of the exons 1 up to and including exon 21, or a combination thereof. Further, the methods teach how to modify the USH2A coding sequence spanning from exon 22 through exon 72 or any of the exons of 72 down to and including exon 22, or a combination thereof. The methods described herein can be used to 1) correct or introduce genetic modifications in the endogenous USH2A gene, 2) maintain isoform production while correcting mutations found in patients with retinitis pigmentosa, or 3) maintain appropriate expression levels of each isoform while correcting mutations found in patients with retinitis pigmentosa, or any combination thereof. The modifications can be used for applied research (e.g., gene therapy) or basic research (e.g., creation of animal models, or understanding gene function).

[0011] In one embodiment, this document features a method for integrating a transgene into the USH2A gene. The method can include transfecting a cell with a rare-cutting endonuclease or transposase which is targeted to the USH2A gene, along with transfecting a transgene. The transgene can integrate into the USH2A gene following cleavage by the rare-cutting endonuclease or transposition by the transposase. The transgene can comprise sequence that is homologous to one or more exons within the USH2A gene, or alternatively, the transgene can encode sequence that is homologous to part of an USH2A protein. The cell being transfected can include an induced pluripotent stem cell (iPSC), an ear cell, or a cell within the retina. In a preferred embodiment, the transgene comprises a partial USH2A coding sequence which encodes a partial USH2A protein. Within this embodiment, the partial USH2A protein is produced by the coding sequence of exons 2-13 or exons 2-21, or any combination of exons between exons 2-13 and exons 2-21 (e.g., exons 2-14, exons 2-15, exons 2-16, exons 2-17, exons 2-18, exons 2-19, and exons 2-20). The cell can be transfected with a transgene comprising exons 2-13 (i.e., exons 2, 3, 4, 5, 6, 7, 8, 9, 10, 11, 12, and 13) of a functional human USH2A gene. Alternatively, the cell can be transfected with a transgene encoding the sequence shown in SEQ ID NO: 13. The transgene can further comprise a promoter which drives expression of the exons. Alternative to a promoter, the transgene can comprise an IRES sequence or a 2A sequence. The transgene can be integrated in an endogenous USH2A gene at the end of exon 13 or within intron 13. In another embodiment, the cell can be transfected with a transgene comprising exons 62-72 (i.e., exons 62, 63, 64, 65, 66, 67, 68, 69, 70, 71, and 72) of the USH2A gene. Alternatively, the cell can be transfected with a transgene encoding the sequence shown in SEQ ID NO: 14. In both cases, the sequence can be followed by a terminator. The transgene can be integrated in an endogenous USH2A gene at the beginning of exon 62 or within intron 61. The rare-cutting endonucleases, which facilitate the integration of the transgene, can include a zinc-finger nuclease, a transcription activator-like effector nuclease, or a CRISPR/Cas endonuclease. The transgene can be delivered to cells using viral vectors, including adenoviral (Ad) vectors, lentiviral vectors, or an adeno-associated viral (AAV) vectors. The transposase which facilitates integration of the transgene can include CRISPR-associated transposase systems. These systems can include Cas12k or Cas6.

[0012] In embodiments, the transgene can comprise a partial coding sequence encoding the peptide produced by USH2A exon 2, and the insertion location can be within exon 2, or within intron 3. The transgene can comprise a partial coding sequence encoding the peptide produced by USH2A exons 2 through 3, and the insertion location can be within exon 3, or within intron 4. The transgene can comprise a partial coding sequence encoding the peptide produced by USH2A exons 2 through 4, and the insertion location can be within exon 4, or within intron 5. The transgene can comprise a partial coding sequence encoding the peptide produced by USH2A exons 2 through 5, and the insertion location can be within exon 5, or within intron 6. The transgene can comprise a partial coding sequence encoding the peptide produced by USH2A exons 2 through 6, and the insertion location can be within exon 6, or within intron 7. The transgene can comprise a partial coding sequence encoding the peptide produced by USH2A exons 2 through 7, and the insertion location can be within exon 7, or within intron 8. The transgene can comprise a partial coding sequence encoding the peptide produced by USH2A exons 2 through 8, and the insertion location can be within exon 8, or within intron 9. The transgene can comprise a partial coding sequence encoding the peptide produced by USH2A exons 2 through 9, and the insertion location can be within exon 9, or within intron 10. The transgene can comprise a partial coding sequence encoding the peptide produced by USH2A exons 2 through 10, and the insertion location can be within exon 10, or within intron 11. The transgene can comprise a partial coding sequence encoding the peptide produced by USH2A exons 2 through 11, and the insertion location can be within exon 11, or within intron 12. The transgene can comprise a partial coding sequence encoding the peptide produced by USH2A exons 2 through 12, and the insertion location can be within exon 12, or within intron 13. The transgene can comprise a partial coding sequence encoding the peptide produced by USH2A exons 2 through 13, and the insertion location can be within exon 13, or within intron 14. The transgene can comprise a partial coding sequence encoding the peptide produced by USH2A exons 2 through 14, and the insertion location can be within exon 14, or within intron 15. The transgene can comprise a partial coding sequence encoding the peptide produced by USH2A exons 2 through 15, and the insertion location can be within exon 15, or within intron 16. The transgene can comprise a partial coding sequence encoding the peptide produced by USH2A exons 2 through 16, and the insertion location can be within exon 16, or within intron 17. The transgene can comprise a partial coding sequence encoding the peptide produced by USH2A exons 2 through 17, and the insertion location can be within exon 17, or within intron 18. The transgene can comprise a partial coding sequence encoding the peptide produced by USH2A exons 2 through 18, and the insertion location can be within exon 18, or within intron 19. The transgene can comprise a partial coding sequence encoding the peptide produced by USH2A exons 2 through 19, and the insertion location can be within exon 19, or within intron 20. The transgene can comprise a partial coding sequence encoding the peptide produced by USH2A exons 2 through 20, and the insertion location can be within exon 20, or within intron 21. The transgene can comprise a partial coding sequence encoding the peptide produced by USH2A exons 2 through 21, and the insertion location can be within exon 21, or within intron 22. The transgene can comprise a partial coding sequence encoding the peptide produced by USH2A exons 22 through 72, and the insertion location can be within intron 21, or immediately preceding intron 21 (i.e., at the junction between intron 21 and exon 22). The transgene can comprise a partial coding sequence encoding the peptide produced by USH2A exons 23 through 72, and the insertion location can be within intron 22, or immediately preceding intron 22. The transgene can comprise a partial coding sequence encoding the peptide produced by USH2A exons 24 through 72, and the insertion location can be within intron 23, or immediately preceding intron 23. The transgene can comprise a partial coding sequence encoding the peptide produced by USH2A exons 25 through 72, and the insertion location can be within intron 24, or immediately preceding intron 24. The transgene can comprise a partial coding sequence encoding the peptide produced by USH2A exons 26 through 72, and the insertion location can be within intron 25, or immediately preceding intron 25. The transgene can comprise a partial coding sequence encoding the peptide produced by USH2A exons 27 through 72, and the insertion location can be within intron 26, or immediately preceding intron 26. The transgene can comprise a partial coding sequence encoding the peptide produced by USH2A exons 28 through 72, and the insertion location can be within intron 27, or immediately preceding intron 27. The transgene can comprise a partial coding sequence encoding the peptide produced by USH2A exons 29 through 72, and the insertion location can be within intron 28, or immediately preceding intron 28. The transgene can comprise a partial coding sequence encoding the peptide produced by USH2A exons 30 through 72, and the insertion location can be within intron 29, or immediately preceding intron 29. The transgene can comprise a partial coding sequence encoding the peptide produced by USH2A exons 31 through 72, and the insertion location can be within intron 30, or immediately preceding intron 30. The transgene can comprise a partial coding sequence encoding the peptide produced by USH2A exons 32 through 72, and the insertion location can be within intron 31, or immediately preceding intron 31. The transgene can comprise a partial coding sequence encoding the peptide produced by USH2A exons 33 through 72, and the insertion location can be within intron 32, or immediately preceding intron 32. The transgene can comprise a partial coding sequence encoding the peptide produced by USH2A exons 34 through 72, and the insertion location can be within intron 33, or immediately preceding intron 33. The transgene can comprise a partial coding sequence encoding the peptide produced by USH2A exons 35 through 72, and the insertion location can be within intron 34, or immediately preceding intron 34. The transgene can comprise a partial coding sequence encoding the peptide produced by USH2A exons 36 through 72, and the insertion location can be within intron 35, or immediately preceding intron 35. The transgene can comprise a partial coding sequence encoding the peptide produced by USH2A exons 37 through 72, and the insertion location can be within intron 36, or immediately preceding intron 36. The transgene can comprise a partial coding sequence encoding the peptide produced by USH2A exons 38 through 72, and the insertion location can be within intron 37, or immediately preceding intron 37. The transgene can comprise a partial coding sequence encoding the peptide produced by USH2A exons 39 through 72, and the insertion location can be within intron 38, or immediately preceding intron 38. The transgene can comprise a partial coding sequence encoding the peptide produced by USH2A exons 40 through 72, and the insertion location can be within intron 39, or immediately preceding intron 39. The transgene can comprise a partial coding sequence encoding the peptide produced by USH2A exons 41 through 72, and the insertion location can be within intron 40, or immediately preceding intron 40. The transgene can comprise a partial coding sequence encoding the peptide produced by USH2A exons 42 through 72, and the insertion location can be within intron 41, or immediately preceding intron 41. The transgene can comprise a partial coding sequence encoding the peptide produced by USH2A exons 43 through 72, and the insertion location can be within intron 42, or immediately preceding intron 42. The transgene can comprise a partial coding sequence encoding the peptide produced by USH2A exons 44 through 72, and the insertion location can be within intron 43, or immediately preceding intron 43. The transgene can comprise a partial coding sequence encoding the peptide produced by USH2A exons 45 through 72, and the insertion location can be within intron 44, or immediately preceding intron 44. The transgene can comprise a partial coding sequence encoding the peptide produced by USH2A exons 46 through 72, and the insertion location can be within intron 45, or immediately preceding intron 45. The transgene can comprise a partial coding sequence encoding the peptide produced by USH2A exons 47 through 72, and the insertion location can be within intron 46, or immediately preceding intron 46. The transgene can comprise a partial coding sequence encoding the peptide produced by USH2A exons 48 through 72, and the insertion location can be within intron 47, or immediately preceding intron 47. The transgene can comprise a partial coding sequence encoding the peptide produced by USH2A exons 49 through 72, and the insertion location can be within intron 48, or immediately preceding intron 48. The transgene can comprise a partial coding sequence encoding the peptide produced by USH2A exons 50 through 72, and the insertion location can be within intron 49, or immediately preceding intron 49. The transgene can comprise a partial coding sequence encoding the peptide produced by USH2A exons 51 through 72, and the insertion location can be within intron 50, or immediately preceding intron 50. The transgene can comprise a partial coding sequence encoding the peptide produced by USH2A exons 52 through 72, and the insertion location can be within intron 51, or immediately preceding intron 51. The transgene can comprise a partial coding sequence encoding the peptide produced by USH2A exons 53 through 72, and the insertion location can be within intron 52, or immediately preceding intron 52. The transgene can comprise a partial coding sequence encoding the peptide produced by USH2A exons 54 through 72, and the insertion location can be within intron 53, or immediately preceding intron 53. The transgene can comprise a partial coding sequence encoding the peptide produced by USH2A exons 55 through 72, and the insertion location can be within intron 54, or immediately preceding intron 54. The transgene can comprise a partial coding sequence encoding the peptide produced by USH2A exons 56 through 72, and the insertion location can be within intron 55, or immediately preceding intron 55. The transgene can comprise a partial coding sequence encoding the peptide produced by USH2A exons 57 through 72, and the insertion location can be within intron 56, or immediately preceding intron 56. The transgene can comprise a partial coding sequence encoding the peptide produced by USH2A exons 58 through 72, and the insertion location can be within intron 57, or immediately preceding intron 57. The transgene can comprise a partial coding sequence encoding the peptide produced by USH2A exons 59 through 72, and the insertion location can be within intron 58, or immediately preceding intron 58. The transgene can comprise a partial coding sequence encoding the peptide produced by USH2A exons 60 through 72, and the insertion location can be within intron 59, or immediately preceding intron 59. The transgene can comprise a partial coding sequence encoding the peptide produced by USH2A exons 61 through 72, and the insertion location can be within intron 60, or immediately preceding intron 60. The transgene can comprise a partial coding sequence encoding the peptide produced by USH2A exons 62 through 72, and the insertion location can be within intron 61, or immediately preceding intron 61. The transgene can comprise a partial coding sequence encoding the peptide produced by USH2A exons 63 through 72, and the insertion location can be within intron 62, or immediately preceding intron 62. The transgene can comprise a partial coding sequence encoding the peptide produced by USH2A exons 64 through 72, and the insertion location can be within intron 63, or immediately preceding intron 63. The transgene can comprise a partial coding sequence encoding the peptide produced by USH2A exons 65 through 72, and the insertion location can be within intron 64, or immediately preceding intron 64. The transgene can comprise a partial coding sequence encoding the peptide produced by USH2A exons 66 through 72, and the insertion location can be within intron 65, or immediately preceding intron 65. The transgene can comprise a partial coding sequence encoding the peptide produced by USH2A exons 67 through 72, and the insertion location can be within intron 66, or immediately preceding intron 66. The transgene can comprise a partial coding sequence encoding the peptide produced by USH2A exons 68 through 72, and the insertion location can be within intron 67, or immediately preceding intron 67. The transgene can comprise a partial coding sequence encoding the peptide produced by USH2A exons 69 through 72, and the insertion location can be within intron 68, or immediately preceding intron 68. The transgene can comprise a partial coding sequence encoding the peptide produced by USH2A exons 70 through 72, and the insertion location can be within intron 69, or immediately preceding intron 69. The transgene can comprise a partial coding sequence encoding the peptide produced by USH2A exons 71 through 72, and the insertion location can be within intron 70, or immediately preceding intron 70. The transgene can comprise a partial coding sequence encoding the peptide produced by USH2A exons 72, and the insertion location can be within intron 71, or immediately preceding intron 71.

[0013] Unless otherwise defined, all technical and scientific terms used herein have the same meaning as commonly understood by one of ordinary skill in the art to which this invention pertains. Although methods and materials similar or equivalent to those described herein can be used to practice the invention, suitable methods and materials are described below. All publications, patent applications, patents, and other references mentioned herein are incorporated by reference in their entirety. In case of conflict, the present specification, including definitions, will control. In addition, the materials, methods, and examples are illustrative only and not intended to be limiting.

[0014] The details of one or more embodiments of the invention are set forth in the description below. Other features, objects, and advantages of the invention will be apparent from the description and from the claims.

### DESCRIPTION OF DRAWINGS

[0015] FIG. 1 is an illustration of the human USH2A genomic sequence. Shown is the genomic region comprising exons 13 through 21 and target sites for transgene integration.

[0016] FIG. 2 is an illustration of an adeno-associated vector comprising a promoter operably linked to a synthetic sequence comprising a partial (p) exon 2 through 13 of the USH2A gene. The partial exon comprises solely the coding sequence (i.e., starting at the start codon).

[0017] FIG. 3 is an illustration of the method to integrate a transgene comprising a promoter operably linked to exons 2(p)-13 of the USH2A gene into the endogenous USH2A genomic sequence. Also shown is the transcriptional product that is generated after integration occurs.

[0018] FIG. 4 is an illustration of the human USH2A genomic sequence. Shown is the genomic region comprising exons 53 through 72 and target sites for transgene integration.

[0019] FIG. 5 is an illustration of an adeno-associated vector comprising a terminator operably linked to a synthetic sequence comprising exons 60 through a partial exon 72 of the USH2A gene.

[0020] FIG. 6 is an illustration of the method to integrate a transgene comprising a terminator operably linked to a synthetic sequence comprising exons 60 through a partial exon 72 of the USH2A gene into the endogenous USH2A genomic sequence. Also shown is the transcriptional product that is generated after integration occurs.

[0021] FIG. 7 is an illustration of the integration of a transgene comprising the hCMV-intron promoter upstream of exons 2(p)-13 of the USH2A gene. Also shown is the location of primers for analyzing the integration event.

[0022] FIG. 8 is an image of gels detecting integration of partial USH2A coding sequences within the USH2A gene.

[0023] FIG. 9 is a graph showing the expression levels of modified USH2A genes within a population of cells delivered gene editing reagents normalized to an internal control (GAPDH).

### DETAILED DESCRIPTION

[0024] Disclosed herein are methods and compositions for modifying the coding sequence of endogenous genes. In some embodiments, the methods include inserting a transgene into an endogenous gene, wherein the transgene provides a partial coding sequence which substitutes for the endogenous gene's coding sequence.

[0025] In one embodiment, this document provides a method of integrating a transgene into the USH2A gene, where the method comprises administering a rare-cutting endonuclease or transposase targeted to a site within the USH2A gene, and administering a transgene, wherein the transgene is integrated within the USH2A gene. The transgene can include a promoter, 2A sequence, or an internal ribosome entry site operably linked to a partial USH2A coding sequence. The transgene can be integrated in a cell comprising the USH2A gene. The method can include the use of a CRISPR-associated transposase to integrate the transgene, including those having Cas12k or Cas6. The Cas12k sequence can be from Scytonema hofmanni or Anabaena cylindrica. The rare-cutting endonuclease can be selected from a CRISPR nuclease, TAL effector nuclease, zinc-finger nuclease, or meganuclease. The endogenous USH2A gene can include an aberrant USH2A gene with one or more mutations that cause Usher syndrome type II. The transgene integrated into the USH2A gene can include a promoter, a partial USH2A coding sequence from a functional USH2A gene, and a splice donor. In one embodiment, the partial coding sequence can encode a peptide produced by exon 2 of a functional USH2A gene. The partial coding sequence can encode a peptide as shown in SEQ ID NO:55. The transgene comprising exon 2 of a functional USH2A gene, or encoding the peptide produced by exon 2 of a functional USH2A gene can be integrated within exon 13, within exon 21, or in a region between exon 13 and exon 21. In one embodiment, the partial coding sequence can comprise USH2A exons 2-13, or it can encode for a peptide produced by exons 2-13 of a functional USH2A gene. The peptide sequence can comprise the amino acid sequence within SEQ ID NO:13. This transgene encoding a peptide produced by exons 2-13 of a functional USH2A gene can be integrated in exon 13 or intron 13 of an aberrant USH2A gene. In another embodiment, the partial coding sequence comprises exons 2-21 from a functional USH2A gene, or encodes for the peptide produced by exons 2-21 of a functional USH2A gene. The peptide sequence can comprise the amino acid sequence within SEQ ID NO:57. Here, the transgene can be integrated in exon 21 or intron 22 of the USH2A gene. The splice donor within the transgene comprising exons 2-21 or encoding a peptide produced by exons 2-21 can be the splice donor from intron 21. In an embodiment, the transgenes can be administered to cells by electroporation. In other embodiments, the promoter within the transgenes designed to modify the 5′ end of the USH2A gene can be a tissue specific promoter, inducible promoter, constitutive promoter, or native USH2A promoter. In embodiments, the transgenes described herein can comprise additional sequences to promote integration. The transgenes can comprise a left and right homology arm, a transposon left end and right end or one or more target sites for one or more rare-cutting endonucleases. The transgenes can be administered to a cell within the retina. In an embodiment, the transgenes can be harbored on adeno-associated virus vectors. In an embodiment, the transgenes can be administered with lipid nanoparticles.

[0026] In another embodiment, the transgene for integration into the endogenous USH2A gene can comprise a splice acceptor, a partial USH2A coding sequence from a functional USH2A gene, and a terminator. The partial coding sequence can encode a peptide produced by exon 72 of a functional USH2A gene. The peptide produced by exon 72 can be the amino acid show in SEQ ID NO:56. The transgene comprising the peptide produced by exon 72 can be integrated in the USH2A gene within the junction of intron 21 and exon 22, the junction of intron 71 and exon 72, or in a region between the junction of intron 21 and exon 22, and the junction of intron 71 and exon 72. In an embodiment, the transgene comprises a partial USH2A coding sequence which encodes for a peptide produced by exons 64-72 of a functional USH2A gene. The partial coding sequence can encode the peptide as shown in SEQ ID NO:61. The transgene can be integrated within intron 63 of the USH2A gene, or at the junction between intron 63 and exon 64. In another embodiment, the transgene can comprise a partial USH2A coding sequence encoded by exons 60-72 of a functional USH2A gene. The partial coding sequence can encode the peptide as shown in SEQ ID NO:62. The transgene can be integrated within intron 63 of the USH2A gene. In embodiments, the transgenes described herein can comprise additional sequences to promote integration. The transgenes can comprise a left and right homology arm, a transposon left end and right end or one or more target sites for one or more rare-cutting endonucleases. The transgenes can be administered to a cell within the retina. In an embodiment, the transgenes can be harbored on adeno-associated virus vectors. In an embodiment, the transgenes can be administered with lipid nanoparticles.

[0027] In another embodiment, this document provides an isolated nucleic acid comprising a promoter operably linked to a partial coding sequence of a functional USH2A gene, a splice donor sequence, and a left and right homology arm, a transposon left end and right end or one or more rare-cutting endonuclease target sites. In another embodiment, this document provides an isolated nucleic acid comprising a 2A sequence or internal ribosome entry site operably linked to a partial coding sequence of a functional USH2A gene, a splice donor sequence, and a left and right homology arm, a transposon left end and right end or one or more rare-cutting endonuclease target sites. The partial USH2A coding sequence can include exon 2 of a functional USH2A gene, or encode a peptide produced by exon 2 of a functional USH2A gene. The partial coding sequence can encode SEQ ID NO:55. In another embodiment, the partial USH2A coding sequence can include exons 2-13 of a functional USH2A gene, or encode for the peptide produced by exons 2-13 of a functional USH2A gene. The partial coding sequence can encode SEQ ID NO:13. In another embodiment, the partial USH2A coding sequence can include exons 2-20 of a functional USH2A gene, or encode for the peptide produced by exons 2-20 of a functional USH2A gene. In another embodiment, the partial USH2A coding sequence can include exons 2-21 of a functional USH2A gene, or encode for the peptide produced by exons 2-21 of a functional USH2A gene. The partial coding sequence can encode SEQ ID NO:57. In an embodiment, the isolated nucleic acid sequence can contain a tissue specific promoter, inducible promoter, a native USH2A promoter, or a constitutive promoter. Specifically, the promoter can be sequence from the native USH2A promoter region. In an embodiment, a splice acceptor sequence can be operably linked to the 2A sequence.

[0028] In another embodiment, this document provides an isolated nucleic acid comprising a splice acceptor sequence operably linked to a partial coding sequence of a functional USH2A gene, a terminator, and a left and right homology arm, a transposon left end and right end, or one or more rare-cutting endonuclease target sites. The partial USH2A coding sequence can include exon 72 of a functional USH2A gene, or encode a peptide produced by exon 72 of a functional USH2A gene. The partial coding sequence can encode SEQ ID NO:56. The partial USH2A coding sequence can include exons 64-72 of a functional USH2A gene, or encode for a peptide produced by exons 64-72 of a functional USH2A gene. The partial coding sequence can encode SEQ ID NO:61. The partial USH2A coding sequence can include exons 63-72 of a functional USH2A gene, or encode for a peptide produced by exons 63-72 of a functional USH2A gene. The partial coding sequence can encode SEQ ID NO:59. The partial USH2A coding sequence can include exons 22-72 of a functional USH2A gene, or encode for a peptide produced by exons 22-72 of a functional USH2A gene. The partial coding sequence can encode SEQ ID NO:58.

[0029] Practice of the methods, as well as preparation and use of the compositions disclosed herein employ, unless otherwise indicated, conventional techniques in molecular biology, biochemistry, chromatin structure and analysis, computational chemistry, cell culture, recombinant DNA and related fields as are within the skill of the art. These techniques are fully explained in the literature. See, for example. Sambrook et al. MOLECULAR CLONING: A LABORATORY MANUAL, Second edition, Cold Spring Harbor Laboratory Press, 1989 and Third edition, 2001; Ausubel et al., CURRENT PROTOCOLS IN MOLECULAR BIOLOGY, John Wiley & Sons, New York, 1987 and periodic updates; the series METHODS IN ENZYMOLOGY, Academic Press, San Diego; Wolffe, CHROMATIN STRUCTURE AND FUNCTION, Third edition, Academic Press, San Diego, 1998; METHODS IN ENZYMOLOGY, Vol. 304, “Chromatin” (P. M. Wassarman and A. P. Wolffe, eds.), Academic Press, San Diego, 1999: and METHODS IN MOLECULAR BIOLOGY, Vol. 119. “Chromatin Protocols” (P. B. Becker, ed.) Humana Press, Totowa, 1999.

[0030] As used herein, the terms “nucleic acid” and “polynucleotide,” can be used interchangeably. Nucleic acid and polynucleotide can refer to a deoxyribonucleotide or ribonucleotide polymer, in linear or circular conformation, and in either single- or double-stranded form. These terms are not to be construed as limiting with respect to the length of a polymer. The terms can encompass known analogues of natural nucleotides, as well as nucleotides that are modified in the base, sugar and/or phosphate moieties.

[0031] The terms “polypeptide,” “peptide” and “protein” can be used interchangeably to refer to amino acid residues covalently linked together. The term also applies to proteins in which one or more amino acids are chemical analogues or modified derivatives of corresponding naturally-occurring amino acids.

[0032] The terms “operatively linked” or “operably linked” are used interchangeably and refer to a juxtaposition of two or more components (such as sequence elements), in which the components are arranged such that both components function normally and allow the possibility that at least one of the components can mediate a function that is exerted upon at least one of the other components. By way of illustration, a transcriptional regulatory sequence, such as a promoter, is operatively linked to a coding sequence if the transcriptional regulatory sequence controls the level of transcription of the coding sequence in response to the presence or absence of one or more transcriptional regulatory factors. A transcriptional regulatory sequence is generally operatively linked in cis with a coding sequence but need not be directly adjacent to it. For example, an enhancer is a transcriptional regulatory sequence that is operatively linked to a coding sequence, even though they are not contiguous. Further, a 2A sequence is operatively linked to a coding sequence if the 2A sequence facilitates separation of two peptides produced from a single transcript.

[0033] As used herein, the term “cleavage” refers to the breakage of the covalent backbone of a nucleic acid molecule. Cleavage can be initiated by a variety of methods including, but not limited to, enzymatic or chemical hydrolysis of a phosphodiester bond. Cleavage can refer to both a single-stranded nick and a double-stranded break. A double-stranded break can occur as a result of two distinct single-stranded nicks. Nucleic acid cleavage can result in the production of either blunt ends or staggered ends. In certain embodiments, rare-cutting endonucleases are used for targeted double-stranded or single-stranded DNA cleavage.

[0034] An “exogenous” molecule can refer to a small molecule (e.g., sugars, lipids, amino acids, fatty acids, phenolic compounds, alkaloids), or a macromolecule (e.g., protein, nucleic acid, carbohydrate, lipid, glycoprotein, lipoprotein, polysaccharide), or any modified derivative of the above molecules, or any complex comprising one or more of the above molecules, generated or present outside of a cell, or not normally present in a cell. Exogenous molecules can be introduced into cells. Methods for the introduction of exogenous molecules into cells can include lipid-mediated transfer, electroporation, direct injection, cell fusion, particle bombardment, calcium phosphate co-precipitation, DEAE-dextran-mediated transfer and viral vector-mediated transfer.

[0035] An “endogenous” molecule is a small molecule or macromolecule that is present in a particular cell at a particular developmental stage under particular environmental conditions. An endogenous molecule can be a nucleic acid, a chromosome, the genome of a mitochondrion, chloroplast or other organelle, or a naturally-occurring episomal nucleic acid. Additional endogenous molecules can include proteins, for example, transcription factors and enzymes.

[0036] As used herein, a “gene,” refers to a DNA region encoding that encodes a gene product, including all DNA regions which regulate the production of the gene product. Accordingly, a gene includes, but is not necessarily limited to, promoter sequences, terminators, translational regulatory sequences such as ribosome binding sites and internal ribosome entry sites, enhancers, silencers, insulators, boundary elements, replication origins, matrix attachment sites and locus control regions. As used herein, a “wild type gene” refers to a form of the gene that is present at the highest frequency in a particular population.

[0037] An “endogenous gene” refers to a DNA region normally present in a particular cell that encodes a gene product as well as all DNA regions which regulate the production of the gene product.

[0038] “Gene expression” refers to the conversion of the information, contained in a gene, into a gene product. A gene product can be the direct transcriptional product of a gene. For example, the gene product can be, but not limited to, mRNA, tRNA, rRNA, antisense RNA, ribozyme, structural RNA, or a protein produced by translation of an mRNA. Gene products also include RNAs which are modified, by processes such as capping, polyadenylation, methylation, and editing, and proteins modified by, for example, methylation, acetylation, phosphorylation, ubiquitination, ADP-ribosylation, myristilation, and glycosylation.

[0039] “Encoding” refers to the conversion of the information contained in a nucleic acid, into a product, wherein the product can result from the direct transcriptional product of a nucleic acid sequence. For example, the product can be, but not limited to, mRNA, tRNA, rRNA, antisense RNA, ribozyme, structural RNA, or a protein produced by translation of an mRNA. Gene products also include RNAs which are modified, by processes such as capping, polyadenylation, methylation, and editing, and proteins modified by, for example, methylation, acetylation, phosphorylation, ubiquitination, ADP-ribosylation, myristilation, and glycosylation.

[0040] As used herein, the term “recombination” refers to a process of exchange of genetic information between two polynucleotides. The term “homologous recombination (HR)” refers to a specialized form of recombination that can take place, for example, during the repair of double-strand breaks. Homologous recombination requires nucleotide sequence homology present on a “donor” molecule. The donor molecule can be used by the cell as a template for repair of a double-strand break. Information within the donor molecule that differs from the genomic sequence at or near the double-strand break can be stably incorporated into the cell's genomic DNA.

[0041] The term “homologous” as used herein refers to a sequence of nucleic acids or amino acids having similarity to a second sequence of nucleic acids or amino acids. In some embodiments, the homologous sequences can have at least 80% sequence identity (e.g., 81%, 85%, 90%, 95%, 96%, 97%, 98%, or 99%, sequence identity) to one another.

[0042] The term “integrating” as used herein refers to the process of adding DNA to a target region of DNA. As described herein, integration can be facilitated by several different means, including non-homologous end joining, homologous recombination, or targeted transposition. By way of example, integration of a user-supplied DNA molecule into a target gene can be facilitated by non-homologous end joining. Here, a targeted-double strand break is made within the target gene and a user-supplied DNA molecule is administered. The user-supplied DNA molecule can comprise exposed DNA ends to facilitate capture during repair of the target gene by non-homologous end joining. The exposed ends can be present on the DNA molecule upon administration (i.e., administration of a linear DNA molecule) or created upon administration to the cell (i.e., a rare-cutting endonuclease cleaves the user-supplied DNA molecule within the cell to expose the ends). In a specific example, integration can occur by homology-independent targeted integration (Suzuki et al., Nature 540:144-149, 2016). In another example, integration occurs though homologous recombination. Here, the user-supplied DNA harbors a left and right homology arm. In another example, integration occurs through transposition. Here, the user-supplied DNA harbors a transposon left and right end.

[0043] The term “transgene” as used herein refers to a sequence of nucleic acids that can be transferred to an organism or cell. The transgene may comprise a gene or sequence of nucleic acids not normally present in the target organism or cell. Additionally, the transgene may comprise a gene or sequence of nucleic acids that is normally present in the target organism or cell. A transgene can be an exogenous DNA sequence introduced into the cytoplasm or nucleus of a target cell. In one embodiment, the transgenes described herein contain a partial coding sequence, wherein the partial coding sequence encodes a portion of a protein that is functional, compared to that portion of the protein produced in the host.

[0044] The term “target gene” as used herein refers to an endogenous gene that is the target for modification. Further, the target gene can be present in two general forms: a “functional” gene or an “aberrant” gene. A functional target gene refers to gene that comprises a sequence of DNA which has the potential, under appropriate conditions, to encode a functional protein. Further, a functional gene refers to a gene that does not comprise a mutation associated or linked with a corresponding genetic disorder. By way of example, a wild type USH2A gene is considered herein as a functional USH2A gene. On the other hand, an aberrant gene refers to a gene that comprises mutations associated with or linked to a corresponding genetic disorder. The aberrant gene can encode an aberrant protein or can express a protein at reduced levels, as compared to a functional gene. The aberrant protein can be an inactive protein, a protein with reduced activity, or a protein with a gain-of-function mutation. By way of example, a functional USH2A gene can encode a functional USH2A protein as shown in SEQ ID NO:48. Additionally, a functional USH2A gene can encode a functional variant of the USH2A protein as shown in SEQ ID NO:48, so long as the variations are not associated with or linked to a corresponding genetic disorder (i.e., Usher syndrome type II). On the other hand, an aberrant USH2A gene can comprise loss-of-function or gain-of-function mutations which lead to phenotype associated with a genetic disorder. Aberrant USH2A genes can include those found in patients with Usher syndrome type II. Specific examples of functional and aberrant USH2A genes are described in McGee et al., J Med Genet 47:499-506, 2010, Baux et al., Hum Mutat 28:781-789, 2007, and Dreyer et al., Hum Mutal 29:451. doi:10.1002humu.9524, 2008, which are incorporated herein by reference.

[0045] The term “partial coding sequence” as used herein refers to a sequence of nucleic acids that encodes a partial protein. The partial coding sequence can encode a protein that comprises one or less amino acids as compared to the wild type protein or functional protein. The partial coding sequence can encode a partial protein with homology to the wild type protein or functional protein. The term “partial USH2A coding sequence” as used herein refers to a sequence of nucleic acids that encodes a partial USH2A protein. The partial USH2A protein has one or less amino acids compared to a wild type USH2A protein. The one or less amino acids can be from the N- or C-terminus end of the protein. If the partial USH2A coding sequence is designed to amend the 5′ end of the USH2A gene (i.e., the N-terminus of the USH2A protein), then the partial USH2A coding sequence can encode a minimum of the first 161 amino acids (i.e., the coding region of the second exon) of the USH2A protein. The partial USH2A coding sequence can comprise the first 936 amino acids (i.e., exons 2-13). The partial USH2A coding sequence can comprise a maximum of first 1542 amino acids of the USH2A protein (i.e., the coding region of exon 2 to exon 21). The methionine at position 1 of the partial USH2A protein can be removed from the partial coding sequence when using 2A sequences. The first 161 amino acids can be the amino acids shown in SEQ ID NO:55. The first 936 amino acids can be the amino acids shown in SEQ ID NO:13. The first 1542 amino acids can be the amino acids shown in SEQ ID NO:57. A representative USH2A gene, including intron and exon sequences and boundaries, can be found in NCBI reference sequence, NG_009497.1. A representative USH2A gene sequence can be found in SEQ ID NO:63. The sequence found in SEQ ID NO:63 can be referenced to identify the following exon and intron sequences: exon 1 includes the sequence from 5001 to 5183, exon 2 includes the sequence from 5857 to 6545, exon 3 includes the sequence from 9718 to 9883, exon 4 includes the sequence from 63312 to 63444, exon 5 includes the sequence from 100743 to 100806, exon 6 includes the sequence from 102798 to 103092, exon 7 includes the sequence from 104045 to 104229, exon 8 includes the sequence from 104702 to 104923, exon 9 includes the sequence from 106421 to 106514, exon 10 includes the sequence from 136027 to 136222, exon 11 includes the sequence from 138987 to 139117, exon 12 includes the sequence from 177299 to 177494, exon 13 includes the sequence from 181171 to 181812, exon 14 includes the sequence from 196261 to 196444, exon 15 includes the sequence from 210847 to 211010, exon 16 includes the sequence from 220966 to 221124, exon 17 includes the sequence from 228276 to 228770, exon 18 includes the sequence from 229813 to 230082, exon 19 includes the sequence from 231675 to 231844, exon 20 includes the sequence from 238030 to 238174, exon 21 includes the sequence from 252915 to 253145, exon 22 includes the sequence from 331184 to 331314, exon 23 includes the sequence from 339258 to 339384, exon 24 includes the sequence from 341577 to 341678, exon 25 includes the sequence from 343520 to 343699, exon 26 includes the sequence from 344811 to 344941, exon 27 includes the sequence from 350035 to 350308, exon 28 includes the sequence from 355097 to 355300, exon 29 includes the sequence from 355428 to 355508, exon 30 includes the sequence from 358105 to 358296, exon 31 includes the sequence from 379750 to 379863, exon 32 includes the sequence from 381805 to 381966, exon 33 includes the sequence from 427835 to 427994, exon 34 includes the sequence from 429339 to 429510, exon 35 includes the sequence from 435230 to 435377, exon 36 includes the sequence from 457621 to 457772, exon 37 includes the sequence from 462918 to 463080, exon 38 includes the sequence from 493602 to 493781, exon 39 includes the sequence from 527492 to 527642, exon 40 includes the sequence from 528180 to 528322, exon 41 includes the sequence from 539343 to 539971, exon 42 includes the sequence from 549299 to 549633, exon 43 includes the sequence from 550517 to 550639, exon 44 includes the sequence from 561227 to 561390, exon 45 includes the sequence from 582364 to 582573, exon 46 includes the sequence from 583901 to 584103, exon 47 includes the sequence from 590294 to 590406, exon 48 includes the sequence from 611202 to 611400, exon 49 includes the sequence from 614493 to 614661, exon 50 includes the sequence from 629272 to 629490, exon 51 includes the sequence from 638115 to 638338, exon 52 includes the sequence from 641523 to 641727, exon 53 includes the sequence from 645462 to 645659, exon 54 includes the sequence from 646201 to 646355, exon 55 includes the sequence from 648356 to 648554, exon 56 includes the sequence from 661609 to 661716, exon 57 includes the sequence from 668554 to 668737, exon 58 includes the sequence from 669645 to 669802, exon 59 includes the sequence from 685062 to 685220, exon 60 includes the sequence from 686860 to 687022, exon 61 includes the sequence from 700013 to 700367, exon 62 includes the sequence from 748021 to 748248, exon 63 includes the sequence from 752781 to 754297, exon 64 includes the sequence from 757104 to 757425, exon 65 includes the sequence from 777596 to 777805, exon 66 includes the sequence from 779631 to 779869, exon 67 includes the sequence from 780667 to 780875, exon 68 includes the sequence from 787663 to 787839, exon 69 includes the sequence from 789159 to 789242, exon 70 includes the sequence from 793694 to 793938, exon 71 includes the sequence from 799362 to 799583, exon 72 includes the sequence from 802527 to 805503, intron 1 includes the sequence from 5184 to 5856, intron 2 includes the sequence from 6546 to 9717, intron 3 includes the sequence from 9884 to 63311, intron 4 includes the sequence from 63445 to 100742, intron 5 includes the sequence from 100807 to 102797, intron 6 includes the sequence from 103093 to 104044, intron 7 includes the sequence from 104230 to 104701, intron 8 includes the sequence from 104924 to 106420, intron 9 includes the sequence from 106515 to 136026, intron 10 includes the sequence from 136223 to 138986, intron 11 includes the sequence from 139118 to 177298, intron 12 includes the sequence from 177495 to 181170, intron 13 includes the sequence from 181813 to 196260, intron 14 includes the sequence from 196445 to 210846, intron 15 includes the sequence from 211011 to 220965, intron 16 includes the sequence from 221125 to 228275, intron 17 includes the sequence from 228771 to 229812, intron 18 includes the sequence from 230083 to 231676, intron 19 includes the sequence from 231845 to 238029, intron 20 includes the sequence from 238175 to 252914, intron 21 includes the sequence from 253146 to 331183, intron 22 includes the sequence from 331315 to 339257, intron 23 includes the sequence from 339385 to 341576, intron 24 includes the sequence from 341679 to 343519, intron 25 includes the sequence from 343700 to 344810, intron 26 includes the sequence from 344942 to 350034, intron 27 includes the sequence from 350309 to 355096, intron 28 includes the sequence from 355301 to 355427, intron 29 includes the sequence from 355509 to 358104, intron 30 includes the sequence from 358297 to 379749, intron 31 includes the sequence from 379864 to 381804, intron 32 includes the sequence from 381967 to 427834, intron 33 includes the sequence from 427995 to 429338, intron 34 includes the sequence from 429511 to 435229, intron 35 includes the sequence from 435378 to 457620, intron 36 includes the sequence from 457773 to 462917, intron 37 includes the sequence from 463081 to 493601, intron 38 includes the sequence from 493782 to 527491, intron 39 includes the sequence from 527643 to 528179, intron 40 includes the sequence from 528323 to 539342, intron 41 includes the sequence from 539972 to 549298, intron 42 includes the sequence from 549634 to 550516, intron 43 includes the sequence from 550640 to 561226, intron 44 includes the sequence from 561391 to 582363, intron 45 includes the sequence from 582574 to 583900, intron 46 includes the sequence from 584104 to 590293, intron 47 includes the sequence from 590407 to 611201, intron 48 includes the sequence from 611401 to 614492, intron 49 includes the sequence from 614662 to 629271, intron 50 includes the sequence from 629491 to 638114, intron 51 includes the sequence from 638339 to 641522, intron 52 includes the sequence from 641728 to 645461, intron 53 includes the sequence from 645660 to 646200, intron 54 includes the sequence from 646356 to 648355, intron 55 includes the sequence from 648555 to 661608, intron 56 includes the sequence from 661717 to 668553, intron 57 includes the sequence from 668738 to 669644, intron 58 includes the sequence from 669803 to 685061, intron 59 includes the sequence from 685221 to 686859, intron 60 includes the sequence from 687023 to 700012, intron 61 includes the sequence from 700368 to 748020, intron 62 includes the sequence from 748249 to 752780, intron 63 includes the sequence from 754298 to 757103, intron 64 includes the sequence from 757426 to 777595, intron 65 includes the sequence from 777806 to 779630, intron 66 includes the sequence from 779870 to 780666, intron 67 includes the sequence from 780876 to 787662, intron 68 includes the sequence from 787840 to 789158, intron 69 includes the sequence from 789243 to 793693, intron 70 includes the sequence from 793939 to 799361, and intron 71 includes the sequence from 799584 to 802526.

[0046] If the partial USH2A coding sequence is designed to amend the 3′ end of the USH2A gene (i.e., the C-terminus of the USH2A protein), then the partial USH2A coding sequence can encode a minimum of the last 29 amino acids (i.e., the coding region in the last exon) of the USH2A protein, and a maximum of last 2795 amino acids of the USH2A protein (i.e., the coding region of exon 22 to exon 72). The partial USH2A coding sequence can comprise the last 1104 amino acids of the USH2A protein (i.e., exons 64-72). The last 29 amino acids can be the amino acids shown in SEQ ID NO:56. The last 3659 amino acids can be the amino acids shown in SEQ ID NO:58. The last 1104 amino acids can be the amino acids shown in SEQ ID NO:59.

[0047] An embodiment provides for the transgene producing a functional fragment of the polypetide. A “functional fragment” of a protein, polypeptide or nucleic acid is a protein, polypeptide or nucleic acid whose sequence is not identical to the full-length protein, polypeptide or nucleic acid, yet retains the same function as the full-length protein, polypeptide or nucleic acid. A functional fragment can possess more, fewer, or the same number of residues as the corresponding native molecule, and/or can contain one or more amino acid or nucleotide substitutions. Methods for determining the function of a nucleic acid (e.g., coding function, ability to hybridize to another nucleic acid) are well-known in the art. Similarly, methods for determining protein function are well-known. For example, the DNA-binding function of a polypeptide can be determined, for example, by filter-binding, electrophoretic mobility-shift, or immunoprecipitation assays. DNA cleavage can be assayed by gel electrophoresis. The ability of a protein to interact with another protein can be determined, for example, by co-immunoprecipitation, two-hybrid assays or complementation, both genetic and biochemical. See, for example, Fields et al. (1989) Nature 340:245-246; U.S. Pat. No. 5,585,245 and PCT WO 98/44350.

[0048] The transgene can also include “functional variants” of the USH2A gene disclosed. Functional variants include, for example, sequences having one or more nucleotide substitutions, deletions or insertions and wherein the variant retains functional polypeptide. Functional variants can be created by any of a number of methods available to one skilled in the art, such as by site-directed mutagenesis, induced mutation, identified as allelic variants, cleaving through use of restriction enzymes, or the like. Examples of functional variants for USH2A include those described in McGee et al., J Med Genet 47:499-506, 2010. These can include, but are not limited to, Lys2080Asn, Ser2196Thr, Val2562Ala, Arg2573His, Asn2930Lys, Thr3115Ala, Asn3199Asp, Gly3618Ser, Arg4192His, Arg4570His, Gly4838Glu, Thr4844Met, Arg4848Gln, Lys5026Glu, and Val5145Ile.

[0049] The term “transposase” as used herein refers to one or more proteins that facilitate the integration of a transposon. A transposase can include a CRISPR-associated transposase (Strecker et al., Science 10.1126/science.aax9181, 2019; Klompe et al., Nature, 10.1038/s41586-019-1323-z, 2019). The transposases can be used in combination with a transgene comprising a transposon left end and right end. The CRISPR transposases can include the TypeV-U5, C2C5 CRISPR protein, Cas12k, along with proteins tnsB, tnsC, and tniQ. In some embodiments, the Cas12k can be from Scytonema hofmanni (SEQ ID NO:21) or Anabaena cylindrica (SEQ ID NO:22). Alternatively, the CRISPR transposase can include the Cas6 protein, along with helper proteins including Cas7, Cas8 and TniQ.

[0050] The terms “left end” and “right end” as used herein refers to a sequence of nucleic acids present on a transposon, which facilitates integration by a transposase. By way of example, integration of DNA using ShCas12k can be facilitated through a left end (SEQ ID NO:23) and right end sequence (SEQ ID NO:24) flanking a cargo sequence.

[0051] As used herein, the term “lipid nanoparticle” refers to a transfer vehicle comprising one or more lipids. The term “lipid nanoparticle” also refers to particles having at least one dimension on the order of nanometers (e.g., 1-1,000 nm) which include one or more lipids. The one or more lipids can be cationic lipids, non-cationic lipids, or PEG-modified lipids. The lipid nanoparticles can be formulated to deliver one or more gene editing reagents to one or more target cells. Examples of suitable lipids include phosphatidylglycerol, phosphatidylcholine, phosphatidylserine, phosphatidylethanolamine, sphingolipids, cerebrosides, and gangliosides. Also contemplated is the use of polymers as transfer vehicles, whether alone or in combination with other transfer vehicles. Suitable polymers may include, for example, polyacrylates, polyalkycyanoacrylates, polylactide, polylactide-polyglycolide copolymers, polycaprolactones, dextran, albumin, gelatin, alginate, collagen, chitosan, cyclodextrins, dendrimers and polyethylenimine. In one embodiment, the transfer vehicle is selected based upon its ability to facilitate the transfection of a gene editing reagent to a target cell.

[0052] The term “region between exon 13 and 21” refers to a location within the USH2A gene. This location includes the sequence spanning from the first nucleotide of intron 13 to the last nucleotide of intron 20. For example, in the representative USH2A gene as shown in SEQ ID NO:63, the “region between exon 13 and 21” corresponds to the nucleotides 181813-252914.

[0053] The term “administering” refers to making application of or giving. To administer a rare-cutting endonuclease refers to making an application of, or giving, a rare-cutting endonuclease. A rare-cutting endonuclease can be administered to a cell, which refers to giving (i.e., delivering) the rare-cutting endonuclease to a cell. A rare-cutting endonuclease can be delivered to a cell through different formats, including nucleic acid, either RNA or DNA (also referred to as polynucleotides), which encodes the rare-cutting endonuclease, or purified protein, or a mixture of RNA, DNA or purified protein. Also, the rare-cutting endonuclease can be delivered by viral vectors. Delivery can be achieved through any suitable method, including electroporation, lipofection, biolistics, or sonication.

[0054] The percent sequence identity between a particular nucleic acid or amino acid sequence and a sequence referenced by a particular sequence identification number is determined as follows. First, a nucleic acid or amino acid sequence is compared to the sequence set forth in a particular sequence identification number using the BLAST 2 Sequences (Bl2seq) program from the stand-alone version of BLASTZ containing BLASTN version 2.0.14 and BLASTP version 2.0.14. This stand-alone version of BLASTZ can be obtained online at fr.com/blast or at ncbi.nlm.nih.gov. Instructions explaining how to use the Bl2seq program can be found in the readme file accompanying BLASTZ. Bl2seq performs a comparison between two sequences using either the BLASTN or BLASTP algorithm. BLASTN is used to compare nucleic acid sequences, while BLASTP is used to compare amino acid sequences. To compare two nucleic acid sequences, the options are set as follows: -i is set to a file containing the first nucleic acid sequence to be compared (e.g., C:\seq1.txt); -j is set to a file containing the second nucleic acid sequence to be compared (e.g., C:\seq2.txt); -p is set to blastn; -o is set to any desired file name (e.g., C:\output.txt); -q is set to -1: -r is set to 2; and all other options are left at their default setting. For example, the following command can be used to generate an output file containing a comparison between two sequences: C:\Bl2seq -i c:\seq1.txt -j c:\seq2.txt -p blastn -o c:\output.txt -q -1 -r 2. To compare two amino acid sequences, the options of Bl2seq are set as follows: -i is set to a file containing the first amino acid sequence to be compared (e.g., C:\seq1.txt): -j is set to a file containing the second amino acid sequence to be compared (e.g., C:\seq2.txt); -p is set to blastp; -o is set to any desired file name (e.g., C:\output.txt); and all other options are left at their default setting. For example, the following command can be used to generate an output file containing a comparison between two amino acid sequences: C:Bl2seq -i c:\seq1.txt -j c:\seq2.txt -p blastp -o c:\output.txt. If the two compared sequences share homology, then the designated output file will present those regions of homology as aligned sequences. If the two compared sequences do not share homology, then the designated output file will not present aligned sequences.

[0055] Once aligned, the number of matches is determined by counting the number of positions where an identical nucleotide or amino acid residue is presented in both sequences. The percent sequence identity is determined by dividing the number of matches either by the length of the sequence set forth in the identified sequence, or by an articulated length (e.g., 100 consecutive nucleotides or amino acid residues from a sequence set forth in an identified sequence), followed by multiplying the resulting value by 100. The percent sequence identity value is rounded to the nearest tenth.

[0056] In one embodiment, the methods include modifying an endogenous usherin (USH2A) gene. The modification can be the insertion of a transgene in the endogenous USH2A genomic sequence. The transgene can include a synthetic and partial coding sequence for the USH2A protein. The partial coding sequence can be homologous to coding sequence within a wild type USH2A gene, or a functional variant of the wild type USH2A gene, or a mutant of the wild type USH2A gene. In some embodiments, the transgene encoding the partial USH2A protein is inserted into the 5′ end of an endogenous USH2A genomic sequence but before intron 21 (i.e., within exons or introns 1-21 but before intron 21). The transgene within the 5′ end of the USH2A gene can harbor a promoter and a synthetic and partial USH2A coding sequence that functions to replace the endogenous exons present upstream of the site of integration. Alternative to a promoter, the transgene can harbor a 2A sequence or an internal ribosome entry site. In other embodiments, the transgene encoding the partial USH2A protein is inserted into the 3′ end of an endogenous USH2A genomic sequence (i.e., within exons or introns 22-72). The transgene within the 3′ end of the USH2A gene can harbor a terminator and a synthetic and partial USH2A coding sequence that functions to replace the endogenous exons present downstream of the site of integration. The methods described herein can be used to modify regions of the coding sequence for endogenous genes, including the USH2A gene.

[0057] In other embodiments, the methods described in this document provide transgenes for integration within the 5′ end of an endogenous USH2A. The transgenes can comprise a promoter and a synthetic and partial USH2A coding sequence, which function to replace the endogenous exons present upstream of the site of integration. In other embodiments, the transgene can comprise a sequence coding for an internal ribosome entry site (IRES) or a self-cleaving 2A peptide followed by the partial USH2A coding sequence. The 2A peptide sequence can be a T2A peptide, a P2A peptide, an E2A peptide, an F2A peptide, or any sequence that results the separation of two polypeptides from a single open reading frame. The 1RES sequence can be a poliovirus IRES, an HCV IRES, an HIV IRES, a p53 IRES, an XIAP IRES, a Bcl-2 IRES, or any sequence that can attract ribosomes in a cap-independent manner.

[0058] In one embodiment, the methods and compositions described herein can be used to modify the 5′ end of the USH2A coding sequence, thereby resulting in modification of the N-terminus of the USH2A protein. The modification of the 5′ end of the USH2A coding sequence can include the replacement of exon 1 up to exon 21. The modification can include exons 1-21, or 1-20, or 1-19, or 1-18, or 1-17, or 1-16, or 1-15, or 1-14, or 1-13, or 1-12, or 1-11, or 1-10, or 1-9, or 1-8, or 1-7, or 1-6, or 1-5, or 1-4, or 1-3, or 1-2, or 2-21, or 2-20, or 2-19, or 2-18, or 2-17, or 2-16, or 2-15, or 2-14, or 2-13, or 2-12, or 2-11, or 2-10, or 2-9, or 2-8, or 2-7, or 2-6, or 2-5, or 2-4, or 2-3 or 2. In one embodiment, the method to modify the 5′ end of the USH2A coding sequence includes the integration of a transgene into the endogenous USH2A gene. The transgene can harbor a partial synthetic USH2A coding sequence comprising exons 1-21, or 1-20, or 1-19, or 1-18, or 1-17, or 1-16, or 1-15, or 1-14, or 1-13, or 1-12, or 1-11, or 1-10, or 1-9, or 1-8, or 1-7, or 1-6, or 1-5, or 1-4, or 1-3, or 1-2 or 2-21, or 2-20, or 2-19, or 2-18, or 2-17, or 2-16, or 2-15, or 2-14, or 2-13, or 2-12, or 2-11, or 2-10, or 2-9, or 2-8, or 2-7, or 2-6, or 2-5, or 2-4, or 2-3 or 2. The transgene harboring the partial synthetic USH2A coding sequence can be integrated within the endogenous USH2A gene at a site that is within or downstream of the exon which corresponds to the last exon of the partial synthetic coding sequence (FIG. 1). The synthetic USH2A coding sequence can also comprise a promoter, IRES, or 2A sequence operably linked to the synthetic USH2A coding sequence. The synthetic USH2A coding sequence can also comprise a splice donor sequence which facilitates the splicing of the intron between the last exon within the synthetic USH2A coding sequence and the downstream exon within the endogenous USH2A sequence (FIGS. 2 and 3). The transgene can be designed in a donor molecule with arms of homology to a target site. The donor molecule can be incorporated into an AAV vector and particle, and delivered in vivo to target cells. The target cells can comprise a USH2A gene with either low or high gene expression. The target cells can be, for example, induced pluripotent stem cells, ear cells or retinal cells. The AAV comprising the donor molecule can be delivered with or without a second AAV encoding a rare-cutting endonuclease. The second AAV encoding a rare-cutting endonuclease can be used to facilitate integration of the donor molecule with the endogenous USH2A gene.

[0059] In another embodiment, the methods and compositions described herein can be used to modify the 3′ end of the USH2A coding sequence, thereby resulting in modification of the C-terminus of the USH2A protein. The modification of the 3′ end of the USH2A coding sequence can include the replacement of exon 72 down to exon 22. The modification of the 3′ end of the USH2A coding sequence can include the replacement of exons 22-72, or 23-72, or 24-72, or 25-72, or 26-72, or 27-72, or 28-72, or 29-72, or 30-72, or 31-72, or 32-72, or 33-72, or 34-72, or 35-72, or 36-72, or 37-72, or 38-72, or 39-72, or 40-72, or 41-72, or 42-72, or 43-72, or 44-72, or 45-72, or 46-72, or 47-72, or 48-72, or 49-72, or 50-72, or 51-72, or 52-72, or 53-72, or 54-72, or 55-72, or 56-72, or 57-72, or 58-72, or 59-72, or 60-72, or 61-72, or 62-72, or 63-72, or 64-72, or 65-72, or 66-72, or 67-72, or 68-72, or 69-72, or 70-72, or 71-72 or 72. In one embodiment, the method to modify the 3′ end of the USH2A coding sequence includes the integration of a transgene into the endogenous USH2A gene. The transgene can harbor a partial synthetic USH2A coding sequence comprising exons 22-72, or 23-72, or 24-72, or 25-72, or 26-72, or 27-72, or 28-72, or 29-72, or 30-72, or 31-72, or 32-72, or 33-72, or 34-72, or 35-72, or 36-72, or 37-72, or 38-72, or 39-72, or 40-72, or 41-72, or 42-72, or 43-72, or 44-72, or 45-72, or 46-72, or 47-72, or 48-72, or 49-72, or 50-72, or 51-72, or 52-72, or 53-72, or 54-72, or 55-72, or 56-72, or 57-72, or 58-72, or 59-72, or 60-72, or 61-72, or 62-72, or 63-72, or 64-72, or 65-72, or 66-72, or 67-72, or 68-72, or 69-72, or 70-72, or 71-72 or 72. The partial synthetic USH2A coding sequence can be integrated within the endogenous USH2A gene upstream or within the exon which corresponds to the first exon within the partial synthetic USH2A coding sequence (FIG. 4). The synthetic USH2A coding sequence can comprise a terminator linked to the last exon in the synthetic USH2A coding sequence. The partial synthetic USH2A coding sequence can also comprise a splice acceptor sequence which facilitates the splicing of the intron between the first exon within the synthetic USH2A coding sequence and the upstream exon within the endogenous USH2A sequence (FIGS. 5 and 6). The transgene can be designed in a donor molecule with arms of homology to the target sequence. The donor molecule can be incorporated into an AAV vector and particle, and delivered in vivo to target cells. The target cells can comprise an endogenous USH2A gene with moderate to high expression. The target cells can be, for example, induced pluripotent stem cells, ear cells or retinal cells. The AAV comprising the donor molecule can be delivered with or without a second AAV encoding a rare-cutting endonuclease. The second AAV encoding a rare-cutting endonuclease can be used to facilitate recombination of the donor molecule with the endogenous USH2A gene.

[0060] In one embodiment, the methods described herein involve the integration of a promoter, partial USH2A coding sequence, and splice donor sequence into the USH2A gene. The promoter within the transgene can be a constitutive promoter, tissue specific promoter, inducible promoter or the native USH2A promoter. The constitutive promoter can be, but not limited to, a CMV promoter, an EF1a promoter, an SV40 promoter, a PGK1 promoter, a Ubc promoter, a human beta actin promoter, or a CAG promoter. The inducible promoter can be, but not limited to, the tetracycline-dependent regulatable promoters or steroid hormone receptor promoters, including the promoters for the progesterone receptor regulatory system. The inducible promoter can be based upon ecdysone-based inducible systems, progesterone-based inducible systems, estrogen-based inducible systems, CID-(chemical inducers of dimerization) based systems or IPTG-based inducible systems. In one embodiment, the transgene comprising an inducible promoter, partial USH2A coding sequence and splice donor sequence is integrated within the endogenous USH2A gene in cells. To enable expression of the modified USH2A gene, the cells are also administered any necessary nucleic acid or proteins to complete the system (e.g., the chimeric regulator GLVP for progesterone-based inducible systems) and are exposed to the inducer (e.g., RU486). In an embodiment, the native USH2A promoter can be operably linked to the partial USH2A coding sequence. The promoter can include sequence upstream of the USH2A 5′ UTR sequence. The promoter can include the upstream 500 nucleotides before the 5′ UTR sequence. Further, the promoter can include the upstream 1000, 1500, 2000, 2500, 3000, 3500, 4000, 4500, 5000, 6000, 7000, 8000, 9000 or 10000 nucleotides before the 5′ UTR sequence.

[0061] In one embodiment, the methods described herein involve the integration of a 2A sequence operably linked to a partial USH2A coding sequence which is operably linked to a splice donor sequence. In one embodiment, the transgene is integrated into an exon. When integrated into an exon, the 2A sequence can be integrated such that the 2A sequence matches the coding frame of the upstream coding sequence of the endogenous gene, resulting in translation through the transgene within the correct frame. If the transgene is to be integrated into an intron, the transgene can further comprise a splice acceptor operably linked to the 2A sequence. To ensure translation through the 2A sequence, 0, 1 or 2 or more nucleotides can be added to the spacer between the splice acceptor sequence and 2A sequence. The use of 2A sequences can be used within transgenes designed to correct the 5′ end of the USH2A gene (exons 1-21), particularly for fixing USH2A genes that are defective due to mutations caused by in frame deletions and amino acid substitutions. The use of 2A sequences can be used to correct mutations caused by a frameshift mutation, with limitations. If there is a premature stop codon caused by a frameshift mutation in an exon (and the stop codon is present in the same exon), then the transgene needs to be integrated within the exon comprising the frameshift mutation, and integrated before or within the premature stop codon. For example, if a transgene is designed to repair the c.2299delG mutation in exon 13, and the transgene comprises a 2A sequence operably linked to a functional USH2A coding sequence, then the transgene should be integrated within the sequence shown in SEQ ID NO:60. In the scenario that the frameshift spans an intron before reaching a stop codon, then the transgene can be integrated i) in the exon comprising the mutation, ii) the intron following the exon with the mutation, or iii) the sequence within the following exon but before or within the premature stop codon.

[0062] As described herein, the partial coding sequence can comprise 5′ or 3′ UTR sequences. The 5′ or 3′ UTR sequences can be homologous to the endogenous USH2A 5′ and 3′ UTR sequences. In other embodiments, the 5′ and 3′ UTRs can be from other genes, but operably linked to the partial coding sequence on the transgenes described herein.

[0063] As described herein, the donor molecule can be in the form of circular or linear double-stranded or single stranded DNA. The donor molecule can be conjugated or associated with a reagent that facilitates stability or cellular update. The reagent can be lipids, calcium phosphate, cationic polymers, DEAE-dextran, dendrimers, polyethylene glycol (PEG) cell penetrating peptides, gas-encapsulated microbubbles or magnetic beads. The donor molecule can be incorporated into a viral particle. The virus can be retroviral, adenoviral, adeno-associated vectors (AAV), herpes simplex, pox virus, hybrid adenoviral vector, epstein-bar virus, lentivirus, or herpes simplex virus.

[0064] In certain embodiments, the AAV vectors as described herein can be derived from any AAV. In certain embodiments, the AAV vector is derived from the defective and nonpathogenic parvovirus adeno-associated type 2 virus. All such vectors are derived from a plasmid that retains only the AAV 145 bp inverted terminal repeats flanking the transgene expression cassette. Efficient gene transfer and stable transgene delivery due to integration into the genomes of the transduced cell are key features for this vector system. (Wagner et al., Lancet 351:9117 1702-3, 1998; Kearns et al., Gene Ther. 9:748-55, 1996). Other AAV serotypes, including AAV1, AAV2, AAV3, AAV4, AAV5, AAV6, AAV7, AAV8, AAV9 and AAVrh.10 and any novel AAV serotype can also be used in accordance with the present invention. In some embodiments, chimeric AAV is used where the viral origins of the long terminal repeat (LTR) sequences of the viral nucleic acid are heterologous to the viral origin of the capsid sequences. Non-limiting examples include chimeric virus with LTRs derived from AAV2 and capsids derived from AAV5, AAV6, AAV8 or AAV9 (i.e. AAV2/5, AAV2/6, AAV2/8 and AAV2/9, respectively).

[0065] The constructs described herein may also be incorporated into an adenoviral vector system. Adenoviral based vectors are capable of very high transduction efficiency in many cell types and do not require cell division. With such vectors, high titer and high levels of expression can been obtained.

[0066] For delivery of gene editing reagents to eye or ear cells, systemic modes of administration can be employed, including oral and parenteral routes. Parenteral routes include, by way of example, intravenous, intrarterial, intramuscular, intradermal, subcutaneous, intranasal, and intraperitoneal routes. Gene editing reagents administered systemically may be modified or formulated to target the components to the eye or inner ear. Alternatively, local modes of administration can be used for delivery of gene editing reagents. These include, but are not limited to, intraocular, intraorbital, subconjuctival, intravitreal, subretinal, transscleral or introcochlear routes. In an embodiment, components described herein are delivered subretinally. e.g., by subretinal injection. Subretinal injections may be made directly into the macular, e.g., submacular injection.

[0067] In an embodiment, components described herein are delivered by intravitreal injection. In an embodiment, nanoparticle or viral particles are delivered intravitreally. In an embodiment, components described herein are delivered into the inner ear by intracochlear injection.

[0068] The methods and compositions of the invention can also be used in the production of modified organisms. The modified organisms can be small mammals, companion animals, livestock, and primates. Non-limiting examples of rodents may include mice, rats, hamsters, gerbils, and guinea pigs. Non-limiting examples of companion animals may include cats, dogs, rabbits, hedgehogs, and ferrets. Non-limiting examples of livestock may include horses, goats, sheep, swine, llamas, alpacas, and cattle. Non-limiting examples of primates may include capuchin monkeys, chimpanzees, lemurs, macaques, marmosets, tamarins, spider monkeys, squirrel monkeys, and vervet monkeys. The methods and compositions of the invention may also be used in zebrafish.

[0069] The methods and compositions described herein can be used to facilitate transgene integration in an endogenous USH2A gene. Integration can occur through homologous recombination or non-homologous end joining. To facilitate homologous recombination between the USH2A gene and a donor molecule, the donor molecule can contain sequence that is homologous to the USH2A gene (e.g., exhibiting between about 80 to 100% sequence identity). To further facilitate homologous recombination, a double-strand break or single-strand nick can be introduced into the endogenous USH2A gene. The double-strand break or single-strand nick can be introduced using one or more rare-cutting endonucleases either in nuclease or nickase formats. The double-strand break or single-strand nicks can be introduced at the site where integration is desired, or a distance upstream or downstream of the site. The distance from the integration site and the double-strand break (or single-strand nick) can be between 0 bp and 10,000 bp.

[0070] The methods and compositions described herein can be used to facilitate homology-independent insertion of a transgene into an endogenous USH2A gene. In one embodiment, a transgene can harbor a partial coding sequence of the USH2A gene and flanking rare-cutting endonuclease target sites can be administered to a cell. Following cleavage by the rare-cutting endonuclease, the liberated transgene can be captured during the repair of a double-strand break and integrated within an endogenous USH2A gene. In another embodiment, a linear transgene harboring a partial coding sequence of the USH2A gene can be administered to a cell. The linear transgene can be captured during the repair of a double-strand break and integrated within an endogenous USH2A gene.

[0071] The methods described in this document can include the use of ram-cutting endonucleases for stimulating recombination or integrating the donor molecule into the USH2A gene. The rare-cutting endonuclease can include CRISPR, TALENs, or zinc-finger nucleases (ZFNs). The CRISPR system can include CRISPR/Cas9 or CRISPR/Cpf1. The CRISPR system can include variants which display broad PAM capability (Hu et al., Nature 556, 57-63, 2018: Nishimasu et al., Science DOI: 10.1126, 2018) or higher on-target binding or cleavage activity (Kleinstiver et al., Nature 529:490-495, 2016). The gene editing reagent can be in the format of a nuclease (Mali et al., Science 339:823-826, 2013; Christian et al., Genetics 186:757-761, 2010), nickase (Cong et al., Science 339:819-823, 2013: Wu et al., Biochemical and Biophysical Research Communications 1:261-266, 2014), CRISPR-FokI dimers (Tsai et al., Nature Biotechnology 32:569-576, 2014), or paired CRISPR nickases (Ran et al., Cell 154:1380-1389, 2013).

[0072] The methods and compositions described in this document can be used in a circumstance where it is desired to modify the coding sequence of USH2A. For example, patients with mutations in exons 1-21 of the USH2A gene (e.g., a guanine deletion, at nucleotide position c.2299) could benefit from the replacement of the 5′ end of the endogenous USH2A coding sequence with a synthetic and WT USH2A coding sequence. In another example, patients with mutations in exons 22-72 of the USH2A gene (e.g., an adenine deletion at nucleotide position c.13140) may benefit from replacement of the 3′ end of the USH2A with a synthetic and WT USH2A coding sequence.

[0073] The methods and compositions described in this document can also be used in the production of transgenic organisms or transgenic animals. Transgenic animals can include those developed for disease models, as well as animals with desirable traits. Cells within the animals can be used in combination with the methods and compositions described herein, which includes embryos. The animals can include small mammals (e.g., mice, rats, hamsters, gerbils, guinea pigs, rabbits, etc.), companion animals (e.g., dogs, cats, rabbits, hedgehogs and ferrets), livestock (horses, goats, sheep, swine, llamas, alpacas, and cattle), and primates (capuchin monkeys, chimpanzees, lemurs, macaques, marmosets, tamarins, spider monkeys, squirrel monkeys, and vervet monkeys). The animal can include a zebrafish.

[0074] The invention will be further described in the following examples, which do not limit the scope of the invention described in the claims.

### EXAMPLES

### Example 1—Modification of the N-Terminus of the USH2A Protein in Human Cells

[0075] The endogenous human USH2A coding sequence (5′ end) was targeted for modification. Three donor molecules were generated to insert a strong constitutive promoter followed by a partial USH2A coding sequence and splice donor sequence. The constructs were designed with arms of homology to facilitate integration by homologous recombination. The first vector, pBA1112-D1, contained a CMV promoter followed by USH2A exons 2-13 and a splice donor sequence. The sequences were flanked by a 483 bp left homology arm and a 900 bp right homology arm. The vector sequence is shown in SEQ ID NO:15 (Table 1) and the corresponding CRISPR nuclease target site is shown in SEQ ID NO:18 (Table 2). To prevent Cas9 from cutting the construct, two synonymous single nucleotide change were included in the PAM sequence. The second vector, pBA1114-D1, contained a CMV promoter followed by USH2A exons 2-15 and a splice donor sequence. The sequences were flanked by a 435 bp left homology arm and a 600 bp right homology arm. The vector sequence is shown in SEQ ID NO:16 and the corresponding CRISPR nuclease target site is shown in SEQ ID NO:19. To prevent Cas9 from cutting the construct, two synonymous single nucleotide changes were included in the target sequence. The third vector, pBA116-D1, contained a CMV promoter followed by USH2A exons 2-20 and a splice donor sequence. The sequences were flanked by a 600 bp left homology arm and a 600 bp right homology arm. The vector sequence is shown in SEQ ID NO:17 and the corresponding CRISPR nuclease target site is shown in SEQ ID NO:20. To prevent Cas9 from cutting the construct, two synonymous single nucleotide changes were included in the target sequence.

TABLE 1
Donor molecules for integration within
the 5′ end of the human USH2A gene

| | | USH2A | Site of | |
|---|---|---|---|---|
| Name | Promoter | exons | integration | SEQ ID NO: |
| pBA1112-D1 | CMV | 2-13 | Following exon 13 | 15 |
| pBA1114-D1 | CMV | 2-15 | Following exon 15 | 16 |
| pBA1116-D1 | CMV | 2-20 | Following exon 20 | 17 |

TABLE 2
CRISPR/Cas9 target sites for targeting double-
trand DNA breaks within the 5′ end of the human
USH2A gene

| | | | SEQ |
|---|---|---|---|
| | | | ID |
| Name | Target | PAM | NO: |
| pBA1113-C1 | GGTCCCAGGTAATGTCCCCA | AGG | 18 |
| pBA1115-C1 | CTGGCCTGTGACCAAGTGAC | AGG | 19 |
| pBA1117-C1 | TAGAAGGACTGAAACCTTAT | AGG | 20 |

[0076] CRISPR nucleases, both Cas9 and the gRNA, were generated as RNA and verified for activity in HEK293T cells. CRISPR RNA was delivered to cells by electroporation (Neon electroporation) and gene editing efficiencies were tested by sequence trace decomposition (Brinkman et al., Nucleic Acids Research 42:e168, 2014). Nuclease pBA1113-C1 had approximately 25% activity; nuclease pBA1115-C1 had approximately 40% activity; and nuclease pBA1117-C1 had approximately 20% activity.

[0077] To knockin the USH2A transgenes in the endogenous USH2A gene, both the CRISPR RNA and donor molecules were transfected into HEK293T cells by electroporation. 72 hours post transfection, genomic DNA was isolated. Successful integration of the USH2A transgene was verified by PCR (FIG. 8). Primers were designed to detect the 5′ and 3′ junctions. To detect the 5′ junction of the transgene carried on pBA1112-D1, primers (CCAGCTAATTAATGTATCCATCACC; SEQ ID NO:25) and (AGATGTACTGCCAAGTAGGAAAG; SEQ ID NO:26) were used. To detect the 3′ junction of the transgene carried on pBA1112-D1, primers (GCAAACCCTGTGACTGTGATAC; SEQ ID NO:27) and (GACATAGGGTGGCCATATACC; SEQ ID NO:28) were used. To detect the 5′ junction of the transgene carried on pBA1114-D1, primers (GAATAATGCTGTATTCTCCAACC; SEQ ID NO:29) and (AGATGTACTGCCAAGTAGGAAAG; SEQ ID NO:26) were used. To detect the 3′ junction of the transgene carried on pBA1114-D1, primers (GTTGTGACCAATGCAAAGACC; SEQ ID NO:30) and (CCCAGCAGGCATTCTTAGG; SEQ ID NO:31) were used. To detect the 5′ junction of the transgene carried on pBA1116-D1, primers (GTATTCTACATTCCAATCTCACTGC; SEQ ID NO:32) and (AGATGTACTGCCAAGTAGGAAAG; SEQ ID NO:26) were used. To detect the 3′ junction of the transgene carried on pBA1116-D1, primers (CCACCAGCGGAACTAAATGG: SEQ ID NO:33) and (TGTCTTAACCTCCTTACACATGG; SEQ ID NO:34) were used. The data shows integration of the pBA1112, pBA1114 and pBA1116 transgenes within the endogenous USH2A gene (FIG. 8; Table 3).

TABLE 3
Transfection conditions corresponding to tire
5′ and 3′ junction PCRs

| | | | Expected 5′ | | Expected 3′ | |
|---|---|---|---|---|---|---|
| Lane | Guide | Donor | band | | band | |
| 1 | — | pBA1112-D1 | — | | — | |
| 2 | — | pBA1114-D1 | — | | — | |
| 3 | — | pBA1116-D1 | — | | — | |
| 4 | — | pBA1118-D1 | — | | — | |
| 5 | — | pBA1120-D1 | — | | — | |
| 6 | — | pBA1122-D1 | — | | — | |
| 7 | pBA1113-C1 | pBA1112-D1 | 878 | bp | 2066 | bp |
| 8 | pBA1115-C1 | pBA1114-D1 | 911 | bp | 1004 | bp |
| 9 | pBA1117-C1 | pBA1116-D1 | 1357 | bp | 1436 | bp |
| 10 | pBA1119-C1 | pBA1118-D1 | 2050 | bp | 1679 | bp |
| 11 | pBA1121-C1 | pBA1120-D1 | 2481 | bp | 1041 | bp |
| 12 | pBA1123-C1 | pBA1122-D1 | 1370 | bp | 960 | bp |

[0078] To verify expression of the modified USH2A gene, cDNA was prepared from the population of modified cells. Primers were designed to specifically detect expression from the modified USH2A gene. Primers were designed to bind to the single-nucleotide polymorphisms present within the modified CRISPR target site. To avoid detecting genomic DNA, primers were designed to span an intron. Expression was normalized to an internal control (GAPDH). The results suggest that expression of the modified USH2A gene occurred from targeted integration of pBA1112, pBA1114 and pBA1116 (FIG. 9).

### Example 2—Modification of the C-Terminus of the USH2A Protein in Human Cells

[0079] The endogenous human USH2A coding sequence (3′ end) was targeted for modification. Three donor molecules were generated to insert a partial USH2A coding sequence followed by a transcriptional terminator. The constructs were designed with arms of homology to facilitate integration by homologous recombination. The first vector, pBA1118-D1, contained a splice acceptor sequence, USH2A exons 64-72, and a SV40 terminator. The sequences were flanked by a 1500 bp left homology arm and a 1267 bp right homology arm. The vector sequence is shown in SEQ ID NO:49 (Table 4) and the corresponding CRISPR nuclease target site is shown in SEQ ID NO:52 (Table 5). To prevent Cas9 from cutting the construct, a single synonymous nucleotide change was introduced into the PAM site. The second vector, pBA1120-D1, contained a splice acceptor sequence, USH2A exons 63-72, and a SV40 terminator. The sequences were flanked by a 750 bp left homology arm and a 500 bp right homology arm. The vector sequence is shown in SEQ ID NO:50 and the corresponding CRISPR nuclease target site is shown in SEQ ID NO:53. To prevent Cas9 from cutting the construct, a synonymous single nucleotide change was included in the PAM sequence. The third vector, pBA1122-D1, contained a splice acceptor sequence, USH2A exons 61-72, and a SV40 terminator. The sequences were flanked by a 600 bp left homology arm and a 600 bp right homology arm. The vector sequence is shown in SEQ ID NO:51 and the corresponding CRISPR nuclease target site is shown in SEQ ID NO:54. To prevent Cas9 from cutting the construct, two synonymous single nucleotide changes were included in the Cas9 binding sequence.

TABLE 4
Donor molecules for integration within
the 3′ end of the human USH2A gene

| | | USH2A | Site of | |
|---|---|---|---|---|
| Name | Promoter | exons | integration | SEQ ID NO: |
| pBA1118-D1 | CMV | 64-72 | Before exon 64 | 49 |
| pBA1120-D1 | CMV | 63-72 | Before exon 63 | 50 |
| pBA1122-D1 | CMV | 61-72 | Before exon 61 | 51 |

TABLE 5
CRISPR/Cas9 target sites for targeting double-
strand DNA breaks within the 3′ end of the human
USH2A gene

| | | | SEQ |
|---|---|---|---|
| | | | ID |
| Name | Target | PAM | NO: |
| pBA1119-C1 | GCATCAAAGGTGCAATCTCA | GGG | 52 |
| pBA1121-C1 | CACTGAACCCTTGGAGTTAC | AGG | 53 |
| pBA1123-C1 | CATCTTCAGTGACGGGTTCC | TGG | 54 |

[0080] CRISPR nucleases, both Cas9 and the gRNA, were generated as RNA and verified for activity in HEK293T cells. CRISPR RNA was delivered to cells by electroporation (Neon electroporation) and gene editing efficiencies were tested by sequence trace decomposition (Brinkman et al., Nucleic Acids Research 42:e168, 2014). Nuclease pBA1119-C1 had approximately 40% activity, nuclease pBA1121-C1 had approximately 20% activity and nuclease pBA123-C1 had approximately 20% activity.

[0081] To knockin the USH2A transgenes in the endogenous USH2A gene, both the CRISPR RNA and donor molecules were transfected into HEK293T cells by electroporation. 72 hours post transfection, genomic DNA was isolated. Successful integration of the USH2A transgene was verified by PCR (FIG. 8). Primers were designed to detect the 5′ and 3′ junction. To detect the 5′ junction of the transgene carried on pBA1118-D1, primers (CCTGACTGTACCTCCAACTTC; SEQ ID NO:35) and (AGAATTCACTGCCCAGACCTGAT: SEQ ID NO:36) were used. To detect the 3′ junction of the transgene carried on pBA1118-D1, primers (GCATTCTAGTTGTGGTTTGTCC; SEQ ID NO:44) and (AGTGTfACGTITCCGATGGTG; SEQ ID NO:37) were used. To detect the 5′ junction of the transgene carried on pBA1120-D1, primers (CCATGATAGGGAGTCATCGAAAG: SEQ ID NO:38) and (GTTGCATCAAAGGTGCAATCTC: SEQ ID NO:39) were used. To detect the 3′ junction of the transgene carried on pBA1120-D1, primers (GCATTCTAGTTGTGGTITGTCC; SEQ ID NO:44) and (ATGTGGATTAGCTGCAGAGG; SEQ ID NO:40) were used. To detect the 5′ junction of the transgene carried on pBA1122-D1, primers (GCCAAGCTCAGAGTGAGTITAC; SEQ ID NO:41) and (TCCAGGGTCAGTGTGTAGAG; SEQ ID NO:42) were used. To detect the 3′ junction of the transgene carried on pBA1122-D1, primers (GCATTCTAGTTGTGGTTTGTCC: SEQ ID NO:44) and (ACCAGTAAGCCATAGTGTATGC; SEQ ID NO:43) were used. The data shows integration of the pBA1118, pBA1120 and pBA1122 transgenes within the endogenous USH2A gene (FIG. 8; Table 3).

### Example 3—Modification of the N-Terminus of the USH2A Protein in Human Cells Using CRISPR-Associated Transposases

[0082] CRISPR-associated transposase vectors, specifically ShCas12k, are designed to knockin the partial USH2A coding sequences carried on pBA1112, pBA1114 and pBA1116. The CMV promoter is replaced with a splice acceptor operably linked to a viral 2A sequence which is operably linked to the USH2A coding sequences. To design the transgenes for use with ShCas12k (GTN PAM sequence), the homology arms are replaced with the left end (SEQ ID NO:23) and right end sequences (SEQ ID NO:24) of Cas12k transposons. Two vectors are generated: a vector comprising CMV promoters driving expression of tnsB, tnsC and tniQ, and a vector encoding ShCas12k (SEQ ID NO:21). Cas12k guide RNAs are designed to target sequences (GCCTGAGGAAGTCACGAGACCTG; SEQ ID NO:45), (TGCATCAGCAGCCTCCATTGCCC; SEQ ID NO:46) and (CAGCCACTTTGGAAGACAGTTTG; SEQ ID NO:47) for integration of pBA1112, pBA1114 and pBA1116 respectively.

[0083] To knockin the USH2A transgenes in the endogenous USH2A gene, the three vectors (ShCas12k, transposon, and tnsB/C/Q vectors) are transfected at equal molar concentrations into HEK293T cells by electroporation. 72 hours post transfection, genomic DNA is isolated and assessed for successful knockin by PCR.

### Example 4—Modification of the N-Terminus of the USH2A Protein (Isoform a and Isoform b) in Human HEK293 Cells

[0084] The endogenous USH2A genomic sequence in human HEK293 cells is targeted for modification, specifically exons 1-13, 1-16 and 1-19. Three donor molecules are synthesized along with three CRISPR/Cas9 nucleases. The donor molecules are designed to harbor an hCMV-intron promoter upstream of a synthetic coding sequence for the 5′ end of the USH2A gene. To facilitate targeted integration, donor molecules comprise either homology arms (ranging from 400-600 bp) or cleavage sites for Cas9 (for integration via NHEJ). A list of the donor molecules is shown in Table 6.

TABLE 6
Donor molecules comprising transgenes for integration
within the 5′ end of the USH2A gene

| | | USH2A | Site of | |
|---|---|---|---|---|
| Name | Promoter | exons | integration | SEQ ID NO |
| pBA1005-D1 | hCMV-intron | 2(p)-13 | Exon-intron 13 | 1 |
| | | | junction | |
| pBA1006-D1 | hCMV-intron | 2(p)-16 | Exon-intron 16 | 2 |
| | | | junction | |
| pBA1007-D1 | hCMV-intron | 2(p)-19 | Exon-intron 19 | 3 |
| | | | junction | |

[0085] Three CRISPR/Cas9 vectors are designed to introduce double-strand breaks near the predicted site of integration for vectors pBA1005-D1, pBA1006-D I and pBA1007-D1. The gRNA targets are shown in Table 7.

TABLE 7
CRISPR/Cas9 target sites for targeting double-
strand DNA breaks within the 5′ end of the USH2A
gene

| | | | SEQ |
|---|---|---|---|
| | | | ID |
| Name | Target | PAM | NO: |
| pBA1005-C1 | GACATTCCTTTTGTTAACTT | AGG | 4 |
| pBA1006-C1 | TACCCATACAGTGAGTTTAA | GGG | 5 |
| pBA1007-C1 | AACTAATGTCCTTTCAGAAT | TGG | 6 |

[0086] Confirmation of the function of the donor molecules and CRISPR/Cas9 vectors is achieved by transfection of HEK293 cells. HEK293 cells are maintained at 37° C. and 5% CO2 in DMEM high glucose without L-glutamine without sodium pyruvate medium supplemented with 10% fetal bovine serum (FBS) and 1% penicillin-streptomycin (PS) solution 100×. HEK293 cells are transfected with each of the plasmid constructs and combinations thereof using Lipofectamine 3000. Two days post transfection, DNA is extracted and assessed for mutations and targeted insertions within the USH2A gene. Nuclease activity is analyzed using the Cel-I assay or by deep sequencing of amplicons comprising the CRISPR/Cas9 target sequence. Successful integration of the transgene is analyzed using the primers illustrated in FIG. 7.

### Example 5—Modification of the C-Terminus of the USH2A Protein (Isoform b) in Human HEK293 Cells

[0087] The endogenous USH2A genomic sequence in human HEK293 cells is targeted for modification, specifically exons 56-72, 58-72, and 60-72. Three donor molecules are synthesized along with three CRISPR/Cas9 nucleases. The donor molecules are designed to harbor a SV40 terminator downstream of a synthetic coding sequence for the 3′ end of the USH2A gene. To facilitate targeted integration, donor molecules comprise either homology arms (ranging from 200-300 bp) or cleavage sites for Cas9 (for integration via NHEJ). A list of the donor molecules is shown in Table 8.

TABLE 8
Donor molecules comprising transgenes for integration
within the 3′ end of the USH2A gene

| | | USH2A | Site of | |
|---|---|---|---|---|
| Name | Terminator | exons | integration | SEQ ID NO: |
| pBA1008-D1 | SV40 | 56-72(p) | Intron 55 | 7 |
| | | | Exon 56 | |
| | | | junction | |
| pBA1009-D1 | SV40 | 58-72(p) | Intron 57 | 8 |
| | | | Exon 58 | |
| | | | junction | |
| pBA1010-D1 | SV40 | 60-72(p) | Intron 59 | 9 |
| | | | Exon 60 | |
| | | | junction | |

[0088] Three CRISPR/Cas9 vectors are designed to introduce double-strand breaks near the predicted site of integration for vectors pBA1008-D1, pBA1009-D1 and pBA1010-D1. The gRNA targets are shown in Table 9.

TABLE 9
CRISPR/Cas9 target sites for targeting double-
strand DNA breaks within the 5′ end of the USH2A
gene

| | | | SEQ |
|---|---|---|---|
| | | | ID |
| Name | Target | PAM | NO: |
| pBA1008-C1 | GAGAGTACTCTTAAATGTTT | TGG | 10 |
| pBA1009-C1 | TTGTTCAAGTCTCTTGTGCA | TGG | 11 |
| pBA1010-C1 | AACTACATATTCATACAGAA | GGG | 12 |

[0089] Confirmation of the function of the donor molecules and CRISPR/Cas9 vectors is achieved by transfection of HEK293 cells. HEK293 cells are maintained at 37° C. and 5% CO2 in DMEM high glucose without L-glutamine without sodium pyruvate medium supplemented with 10% fetal bovine serum (FBS) and 1% penicillin-streptomycin (PS) solution 100×. HEK293 cells are transfected with each of the plasmid constructs and combinations thereof using Lipofectamine 3000. Two days post transfection. DNA is extracted and assessed for mutations and targeted insertions within the USH2A gene. Nuclease activity is analyzed using the Cel-1 assay or by deep sequencing of amplicons comprising the CRISPR/Cas9 target sequence. Successful integration of the transgene is analyzed using primers within the transgene and within the endogenous USH2A gene (but outside of the extent of any homology arms).

### OTHER EMBODIMENTS

[0090] It is to be understood that while the invention has been described in conjunction with the detailed description thereof, the foregoing description is intended to illustrate and not limit the scope of the invention, which is defined by the scope of the appended claims. Other aspects, advantages, and modifications are within the scope of the following claims.

The application's sequence listing, which the Patent Office published only in electronic form, follows.

SEQUENCE LISTING (63 sequences)

SEQ ID NO: 1 - DNA, 4518 bp, Artificial Sequence
  Construct
tccagctaattaatgtatccatcacctcatgtacttatcatgtttttggggtgagaacatttaagatctaatctcttagcaattttcaagtatacaatacattattattaagtatagtcaccatgctgtacaatagagctccagaacttattcattctgtctagctgaaactttgtactcagcttaaccttttattaaacatctttagagatttcttatctttagaaaaacaactaatttgttatatgtaattctactataattttaaatgagcacatttgttaaaatagtttttaagatttgttaaagagaaaaagagctccagcatatgtaacagaaacaacatttgcattaagcatttttctttgcattaagtaataattaaaaatttatgaagttcatcgcaaacagttgtatattaaagctaaattaaatattgtcattgaattttgagagtaagattggccccctatggcattgcttgtgagaaaacactcaatattttgtgttcgtatcatctgcagtagcattgtttgtgtctcgtctatcttgaatgaaatcattttcccatcctcaccttttaaatatattttatctttagcgttacataacttacggtaaatggcccgcctggctgaccgcccaacgacccccgcccattgacgtcaataatgacgtatgttcccatagtaacgccaatagggactttccattgacgtcaatgggtggagtatttacggtaaactgcccacttggcagtacatcaagtgtatcatatgccaagtacgccccctattgacgtcaatgacggtaaatggcccgcctggcattatgcccagtacatgaccttatgggactttcctacttggcagtacatctacgtattagtcatcgctattaccatggtgatgcggttttggcagtacatcaatgggcgtggatagcggtttgactcacggggatttccaagtctccaccccattgacgtcaatgggagtttgttttggcaccaaaatcaacgggactttccaaaatgtcgtaacaactccgccccattgacgcaaatgggcggtaggcgtgtacggtgggaggtctatataagcagagctatgaattgcccagttctttcattgggctctggcttcttgtttcaggtcattgaaatgttgatctttgcctattttgcttcaatatccttgactgagtcacgaggtcttttcccaaggctggagaacgtgggagctttcaagaaagtttccatcgtgccaacccaagcagtatgtggactcccagaccgaagcactttttgtcacagctctgctgctgctgaaagtattcagttctgtacccagcggttttgtattcaggattgcccatacagatcttcacaccctacctacactgcccttttctcagcaggcctcagtagctgcatcacaccagacaagaatgatctgcatcctaacgcccatagcaattctgcaagttttatttttggaaatcacaagagctgcttttcttctcctccttctccaaagctgatggcatcatttaccttagctgtatggctgaaacctgagcaacaaggtgtaatgtgtgttatagaaaagacagtagatgggcagattgtgttcaaacttacaatatctgagaaagagaccatgttttattatcgcacagtaaatggtttgcaacctccaataaaagtaatgacactggggagaattcttgtgaagaaatggattcatcttagtgtgcaggtgcatcagacaaaaatcagcttctttatcaatggcgtggagaaggatcatacacctttcaatgcaagaactctaagtggttcaattacagattttgcatctggtactgtgcaaataggacagagtttaaatggtttagagcagtttgtcggaagaatgcaagattttcgattataccaagtggcacttacaaacagagagattctggaagtcttctctggagatcttctcagattgcatgcccaatcacattgccgttgccctggcagccacccgcgggtccaccctttggcacagcggtactgcattcctaatgatgcaggagacacagctgataatagagtgtcacggttgaatcctgaagcccatcctctctcttttgtcaatgataatgatgttggtacttcatgggtttcaaatgtgtttacaaacattacacagcttaatcaaggagtgactatttcagttgatttggaaaatggacagtatcaggtgttttatattatcattcagttctttagtccacaaccaacggaaataaggattcaaaggaagaaggaaaatagtttagattgggaggactggcaatattttgccaggaattgtggtgcttttggaatgaaaaacaatggagatttggaaaaacctgattctgtcaactgtcttcagctttccaattttactccatattcccgtggcaatgtcacatttagcatcctgacacctggaccaaattatcgtcctggatacaataacttctataataccccatctcttcaagagttcgtaaaagccacgcaaataaggtttcattttcatgggcagtactatacaactgagactgctgttaacctcagacacagatattatgcagtggacgaaatcaccattagtgggagatgtcagtgccatggtcatgccgataactgcgacacaacaagccagccatatagatgcctctgctcccaggagagcttcactgaaggacttcattgtgatcgctgcttgcctctttataatgacaagcctttccgccaaggtgatcaagtttacgctttcaattgtaaaccttgtcaatgcaacagccattccaaaagctgccattacaacatctctgtagacccatttccttttgagcacttcagagggggaggaggagtttgtgatgattgtgagcataacactacaggaaggaactgtgagctgtgcaaggattactttttccgacaagttggtgcagatccttcggccatagatgtttgcaaaccctgtgactgtgatacagttggcactagaaatggtagcattctttgtgatcagattggaggacagtgtaattgtaagagacacgtgtctggcaggcagtgcaatcagtgccagaatggattctacaatctacaagagttggatcctgatggctgcagtccctgtaactgcaatacctctgggacagtggatggagatattacctgtcaccaaaattcaggccagtgcaagtgcaaagcaaacgttattgggcttaggtgtgatcattgcaattttggatttaaatttctccgaagctttaatgatgttggatgtgagccctgccagtgtaacctccatggctcagtgaacaaattctgcaatcctcactctgggcagtgtgagtgcaaaaaagaagccaaaggacttcagtgtgacacctgcagagaaaacttttatgggttagatgtcaccaattgtaaggcctgtgactgtgacacagctggatccctccctgggactgtctgtaatgctaagacagggcagtgcatctgcaagcccaatgttgaagggagacagtgcaataaatgtttggagggaaacttctacctacggcaaaataattctttcctctgtctgccttgcaactgtgataagactgggacaataaatggctctctgctgtgtaacaaatcaacaggacaatgtccttgcaaattaggggtaacaggtcttcgctgtaatcagtgtgagcctcacaggtacaatttgaccattgacaattttcaacactgccagatgtgtgagtgtgattccttggggacattacctgggaccatttgtgacccaatcagtggccagtgcctgtgtgtgcctaatcgtcaaggaagaaggtgtaatcagtgtcaaccaggtaagaaagaaatgtattacattttcagtgcacaatgacattccttttgttaacttatttaacttctccctgtttctggtttgtggcttctacaaattttatttccaaaatcattactgtatttatatcattatccaacacatatataactatttaacttattcaaaattatctgcatatttatgttactattttgagaggatactttagataaaactcagccgatcggatttatttcataattgagactcaatttctacacttgaagtaaatctcctttttaacagttttttaaaaatcagatcaacaagagtcaattttattttccagagaaaggaaaatttgagttgaatatccatacaatgccaaatattcaaatgatgaactaaatctctgaataaagctggctaaatgtttttgctgaagaggctatatgttctagttttatatagaaatacctagaattgtttccacatgccatcaaattaataaaataggccactgtttaatctcattatatacaaacttatctttccatctctttcccaattgggagagggatagaccccatctatggctctccttacatttaagatttta

SEQ ID NO: 2 - DNA, 4724 bp, Artificial Sequence
  Construct
aagattatgctacttaaatttcaagtttcaatggaacttatgtcaacttttaaattaactatgtaaaaaataaatgttgtgcatccttggatggtttctcaaaaaaaaaaaaaaaaaaggcaaagaaagaaatgcttaatgtaaactatggtggttttttacccccaactatatttatgccagctgctttgacctaaaaagtttttttatgcttatagataaaaagctttgttttagagaactcatgaaccctttgtttattaatgtcttggtaaaccacatgtcttcttgataaagcaatcctgaatcagaaagacctctttgctggatatcttacttcagtttgcttttctgtttattgattgctttgctaataaatgctctcttcattgtaatttagcgttacataacttacggtaaatggcccgcctggctgaccgcccaacgacccccgcccattgacgtcaataatgacgtatgttcccatagtaacgccaatagggactttccattgacgtcaatgggtggagtatttacggtaaactgcccacttggcagtacatcaagtgtatcatatgccaagtacgccccctattgacgtcaatgacggtaaatggcccgcctggcattatgcccagtacatgaccttatgggactttcctacttggcagtacatctacgtattagtcatcgctattaccatggtgatgcggttttggcagtacatcaatgggcgtggatagcggtttgactcacggggatttccaagtctccaccccattgacgtcaatgggagtttgttttggcaccaaaatcaacgggactttccaaaatgtcgtaacaactccgccccattgacgcaaatgggcggtaggcgtgtacggtgggaggtctatataagcagagctatgaattgcccagttctttcattgggctctggcttcttgtttcaggtcattgaaatgttgatctttgcctattttgcttcaatatccttgactgagtcacgaggtcttttcccaaggctggagaacgtgggagctttcaagaaagtttccatcgtgccaacccaagcagtatgtggactcccagaccgaagcactttttgtcacagctctgctgctgctgaaagtattcagttctgtacccagcggttttgtattcaggattgcccatacagatcttcacaccctacctacactgcccttttctcagcaggcctcagtagctgcatcacaccagacaagaatgatctgcatcctaacgcccatagcaattctgcaagttttatttttggaaatcacaagagctgcttttcttctcctccttctccaaagctgatggcatcatttaccttagctgtatggctgaaacctgagcaacaaggtgtaatgtgtgttatagaaaagacagtagatgggcagattgtgttcaaacttacaatatctgagaaagagaccatgttttattatcgcacagtaaatggtttgcaacctccaataaaagtaatgacactggggagaattcttgtgaagaaatggattcatcttagtgtgcaggtgcatcagacaaaaatcagcttctttatcaatggcgtggagaaggatcatacacctttcaatgcaagaactctaagtggttcaattacagattttgcatctggtactgtgcaaataggacagagtttaaatggtttagagcagtttgtcggaagaatgcaagattttcgattataccaagtggcacttacaaacagagagattctggaagtcttctctggagatcttctcagattgcatgcccaatcacattgccgttgccctggcagccacccgcgggtccaccctttggcacagcggtactgcattcctaatgatgcaggagacacagctgataatagagtgtcacggttgaatcctgaagcccatcctctctcttttgtcaatgataatgatgttggtacttcatgggtttcaaatgtgtttacaaacattacacagcttaatcaaggagtgactatttcagttgatttggaaaatggacagtatcaggtgttttatattatcattcagttctttagtccacaaccaacggaaataaggattcaaaggaagaaggaaaatagtttagattgggaggactggcaatattttgccaggaattgtggtgcttttggaatgaaaaacaatggagatttggaaaaacctgattctgtcaactgtcttcagctttccaattttactccatattcccgtggcaatgtcacatttagcatcctgacacctggaccaaattatcgtcctggatacaataacttctataataccccatctcttcaagagttcgtaaaagccacgcaaataaggtttcattttcatgggcagtactatacaactgagactgctgttaacctcagacacagatattatgcagtggacgaaatcaccattagtgggagatgtcagtgccatggtcatgccgataactgcgacacaacaagccagccatatagatgcctctgctcccaggagagcttcactgaaggacttcattgtgatcgctgcttgcctctttataatgacaagcctttccgccaaggtgatcaagtttacgctttcaattgtaaaccttgtcaatgcaacagccattccaaaagctgccattacaacatctctgtagacccatttccttttgagcacttcagagggggaggaggagtttgtgatgattgtgagcataacactacaggaaggaactgtgagctgtgcaaggattactttttccgacaagttggtgcagatccttcggccatagatgtttgcaaaccctgtgactgtgatacagttggcactagaaatggtagcattctttgtgatcagattggaggacagtgtaattgtaagagacacgtgtctggcaggcagtgcaatcagtgccagaatggattctacaatctacaagagttggatcctgatggctgcagtccctgtaactgcaatacctctgggacagtggatggagatattacctgtcaccaaaattcaggccagtgcaagtgcaaagcaaacgttattgggcttaggtgtgatcattgcaattttggatttaaatttctccgaagctttaatgatgttggatgtgagccctgccagtgtaacctccatggctcagtgaacaaattctgcaatcctcactctgggcagtgtgagtgcaaaaaagaagccaaaggacttcagtgtgacacctgcagagaaaacttttatgggttagatgtcaccaattgtaaggcctgtgactgtgacacagctggatccctccctgggactgtctgtaatgctaagacagggcagtgcatctgcaagcccaatgttgaagggagacagtgcaataaatgtttggagggaaacttctacctacggcaaaataattctttcctctgtctgccttgcaactgtgataagactgggacaataaatggctctctgctgtgtaacaaatcaacaggacaatgtccttgcaaattaggggtaacaggtcttcgctgtaatcagtgtgagcctcacaggtacaatttgaccattgacaattttcaacactgccagatgtgtgagtgtgattccttggggacattacctgggaccatttgtgacccaatcagtggccagtgcctgtgtgtgcctaatcgtcaaggaagaaggtgtaatcagtgtcaaccaggtttttatatttctccaggcaatgccactggctgcctgccatgctcatgccatacaactggtgcagttaatcacatctgtaatagcctgactggtcagtgtgtttgccaagatgcttccattgctgggcaacgttgtgaccaatgcaaagaccattactttggatttgatcctcagactggaagatgtcagccttgtaattgtcatctctcaggagccttgaatgaaacctgtcacttggtcacaggccagtgtttctgtaaacaatttgtcactggctcaaagtgtgatgcttgtgttcccagtgcaagccacttggatgtcaacaatctattgggttgcagcaaaactccattccagcaacctccgcccagaggacaagttcaaagttcttctgctatcaatctctcctggagtccacctgattctccaaatgcccactggcttacttacagtttactcagggatggttttgaaatctacacaacagaggatcaatacccatacagtgagtttaagcatttggtaatagaaataaatattctgagaattgacacattagttaagttctttgacattgaggataaatgctgttgtggtttcctctgtctggcacagagtgtttcaaacagagataaaattacaaatttcactagtaatcaaagaaatacaataaaaatgagatgcttattatctgataaatactaatgcttatcacattctcaaagatgaaaaaaaaatgaccccatcaagaattgatgggaatgtggggaagctggaacttttataaactgctgaggtgtctgtgtgagttcattagtacaacttttcatgtacaataatttgttaaaatctatgaaaaaatctttccttttaacataacatttgacttagcaaacttattttaggaagtttatctcaagtgaacagtcattaagtagacacacaagatgtccatacctattctatttgtaacatcaaaatattgaaaatgattcagatgttcaa

SEQ ID NO: 3 - DNA, 4882 bp, Artificial Sequence
  Construct
ccaattctgaaaggacattagttcgttacataacttacggtaaatggcccgcctggctgaccgcccaacgacccccgcccattgacgtcaataatgacgtatgttcccatagtaacgccaatagggactttccattgacgtcaatgggtggagtatttacggtaaactgcccacttggcagtacatcaagtgtatcatatgccaagtacgccccctattgacgtcaatgacggtaaatggcccgcctggcattatgcccagtacatgaccttatgggactttcctacttggcagtacatctacgtattagtcatcgctattaccatggtgatgcggttttggcagtacatcaatgggcgtggatagcggtttgactcacggggatttccaagtctccaccccattgacgtcaatgggagtttgttttggcaccaaaatcaacgggactttccaaaatgtcgtaacaactccgccccattgacgcaaatgggcggtaggcgtgtacggtgggaggtctatataagcagagctatgaattgcccagttctttcattgggctctggcttcttgtttcaggtcattgaaatgttgatctttgcctattttgcttcaatatccttgactgagtcacgaggtcttttcccaaggctggagaacgtgggagctttcaagaaagtttccatcgtgccaacccaagcagtatgtggactcccagaccgaagcactttttgtcacagctctgctgctgctgaaagtattcagttctgtacccagcggttttgtattcaggattgcccatacagatcttcacaccctacctacactgcccttttctcagcaggcctcagtagctgcatcacaccagacaagaatgatctgcatcctaacgcccatagcaattctgcaagttttatttttggaaatcacaagagctgcttttcttctcctccttctccaaagctgatggcatcatttaccttagctgtatggctgaaacctgagcaacaaggtgtaatgtgtgttatagaaaagacagtagatgggcagattgtgttcaaacttacaatatctgagaaagagaccatgttttattatcgcacagtaaatggtttgcaacctccaataaaagtaatgacactggggagaattcttgtgaagaaatggattcatcttagtgtgcaggtgcatcagacaaaaatcagcttctttatcaatggcgtggagaaggatcatacacctttcaatgcaagaactctaagtggttcaattacagattttgcatctggtactgtgcaaataggacagagtttaaatggtttagagcagtttgtcggaagaatgcaagattttcgattataccaagtggcacttacaaacagagagattctggaagtcttctctggagatcttctcagattgcatgcccaatcacattgccgttgccctggcagccacccgcgggtccaccctttggcacagcggtactgcattcctaatgatgcaggagacacagctgataatagagtgtcacggttgaatcctgaagcccatcctctctcttttgtcaatgataatgatgttggtacttcatgggtttcaaatgtgtttacaaacattacacagcttaatcaaggagtgactatttcagttgatttggaaaatggacagtatcaggtgttttatattatcattcagttctttagtccacaaccaacggaaataaggattcaaaggaagaaggaaaatagtttagattgggaggactggcaatattttgccaggaattgtggtgcttttggaatgaaaaacaatggagatttggaaaaacctgattctgtcaactgtcttcagctttccaattttactccatattcccgtggcaatgtcacatttagcatcctgacacctggaccaaattatcgtcctggatacaataacttctataataccccatctcttcaagagttcgtaaaagccacgcaaataaggtttcattttcatgggcagtactatacaactgagactgctgttaacctcagacacagatattatgcagtggacgaaatcaccattagtgggagatgtcagtgccatggtcatgccgataactgcgacacaacaagccagccatatagatgcctctgctcccaggagagcttcactgaaggacttcattgtgatcgctgcttgcctctttataatgacaagcctttccgccaaggtgatcaagtttacgctttcaattgtaaaccttgtcaatgcaacagccattccaaaagctgccattacaacatctctgtagacccatttccttttgagcacttcagagggggaggaggagtttgtgatgattgtgagcataacactacaggaaggaactgtgagctgtgcaaggattactttttccgacaagttggtgcagatccttcggccatagatgtttgcaaaccctgtgactgtgatacagttggcactagaaatggtagcattctttgtgatcagattggaggacagtgtaattgtaagagacacgtgtctggcaggcagtgcaatcagtgccagaatggattctacaatctacaagagttggatcctgatggctgcagtccctgtaactgcaatacctctgggacagtggatggagatattacctgtcaccaaaattcaggccagtgcaagtgcaaagcaaacgttattgggcttaggtgtgatcattgcaattttggatttaaatttctccgaagctttaatgatgttggatgtgagccctgccagtgtaacctccatggctcagtgaacaaattctgcaatcctcactctgggcagtgtgagtgcaaaaaagaagccaaaggacttcagtgtgacacctgcagagaaaacttttatgggttagatgtcaccaattgtaaggcctgtgactgtgacacagctggatccctccctgggactgtctgtaatgctaagacagggcagtgcatctgcaagcccaatgttgaagggagacagtgcaataaatgtttggagggaaacttctacctacggcaaaataattctttcctctgtctgccttgcaactgtgataagactgggacaataaatggctctctgctgtgtaacaaatcaacaggacaatgtccttgcaaattaggggtaacaggtcttcgctgtaatcagtgtgagcctcacaggtacaatttgaccattgacaattttcaacactgccagatgtgtgagtgtgattccttggggacattacctgggaccatttgtgacccaatcagtggccagtgcctgtgtgtgcctaatcgtcaaggaagaaggtgtaatcagtgtcaaccaggtttttatatttctccaggcaatgccactggctgcctgccatgctcatgccatacaactggtgcagttaatcacatctgtaatagcctgactggtcagtgtgtttgccaagatgcttccattgctgggcaacgttgtgaccaatgcaaagaccattactttggatttgatcctcagactggaagatgtcagccttgtaattgtcatctctcaggagccttgaatgaaacctgtcacttggtcacaggccagtgtttctgtaaacaatttgtcactggctcaaagtgtgatgcttgtgttcccagtgcaagccacttggatgtcaacaatctattgggttgcagcaaaactccattccagcaacctccgcccagaggacaagttcaaagttcttctgctatcaatctctcctggagtccacctgattctccaaatgcccactggcttacttacagtttactcagggatggttttgaaatctacacaacagaggatcaatacccatacagtattcaatacttcttagacacagacctgttaccatataccaaatattcctattacattgagaccaccaatgtgcatggttcaacaaggagtgtagctgtcacttacaagacaaaaccaggggtcccagagggaaacttgactttaagttatatcattcctattggctcagactctgtgacacttacctggacaacactctcaaatcaatctggtcccatagagaaatatattttgtcctgtgcccctttggctggtggtcagccatgtgtttcctacgaaggtcatgaaacctcagctaccatctggaatctggttccatttgccaagtacgatttttctgtacaggcgtgtactagcgggggctgtttacacagcttgcccattacagtgaccacagcccaggcccctccccaaagactaagtccacctaagatgcagaaaatcagttctacagaacttcatgtagaatggtctccaccagcggaactaaatggaataattataagatatgaactatacatgagaagactgagatctactaaagaaaccacatctgaggaaagtcgagtttttcagagcagtggttggctcagtcctcattcatttgtagaatcggccaatgaaaatgcattaaaacctcctcaaacaatgacaaccatcactggcttggagccatacaccaagtatgagttcagagtcttagctgtgaatatggctggaagtgtgtcttctgcctgggtctcagaaagaacgggagaatcagcacctgtattcatgatccctccttcagtctttcccctctcttcgtactctctcaatatctcctgggagaagccagcagataatgttacaagaggaaaagttgtggggtatgacatcaatatgctttctgaacaatcacctcaacagtctattcccatggcgttttcacaggtattgttatttttaactaatgtcctttcagaattggcttagggcttcatttggacattttttgagtttgcagaattctgtgacagaattctccctctat

SEQ ID NO: 4 - DNA, 23 bp, Artificial Sequence
  gRNA target
gacattccttttgttaacttagg

SEQ ID NO: 5 - DNA, 23 bp, Artificial Sequence
  gRNA target
tacccatacagtgagtttaaggg

SEQ ID NO: 6 - DNA, 23 bp, Artificial Sequence
  gRNA target
aactaatgtcctttcagaattgg

SEQ ID NO: 7 - DNA, 5028 bp, Artificial Sequence
  Construct
attagtttatcagtgataaatgaaattttgcccaatacttagcctcttatgaggttcagaccttctttaaagagtgttttagagagtactcttaaatgttttggctatcatatctacaactctgcatgttacttctggtacttaattgataataaataatcctcttaaggtgcactttatttcttgcttgctttttctaggtctccagccatacaccaactacagcttcactcttacagcttgtacatctgctgggtgcacttcaagcgagccttttctaggtcagacactgcaggcagctcctgaaggagtttgggtgacacctcgacacattatcatcaattctacaacagtggaattatattggagtctgccagaaaagcccaatggcctcgtttctcaatatcaattgagtcgtaatggaaacttgcttttcctgggtggcagtgaggagcagaatttcactgataaaaacctggagcccaatagcagatacacttacaagttagaagtcaaaactggaggtggcagcagtgctagtgatgattacattgttcaaacacctatgtcaacaccagaagaaatctatcctccatataatatcacagtaattgggccttattctatatttgtagcttggataccaccagggatcctcatccccgaaattcctgtggagtacaatgtcttactcaatgatggaagtgtaacacctctggccttctccgttggtcatcatcaatccacccttctggaaaatttgactccattcacacagtatgagataaggatacaagcatgtcaaaatggaagttgtggagttagcagtaggatgtttgtcaaaacacctgaagcagccccaatggatcttaattctcctgttcttaaggcactggggtcagcttgcatagagattaagtggatgccacctgaaaaaccaaatggaatcatcatcaactactttatttacagacgccctgctggcattgaagaggagtctgttttatttgtctggtcagaaggagcccttgaatttatggatgaaggagacaccctgaggcctttcacactctacgaatatcgggtcagagcctgtaactccaagggttcagtggagagtctgtggtcattaacacaaactctggaagctccacctcaagattttccagctccttgggctcaagccacgagtgctcattcagttctgttgaattggacaaagccagaatctcccaatggcattatctcccattaccgtgtggtctaccaggagagacccgacgatcctacatttaacagccctaccgtgcatgctttcacagtgaagggaacaagccatcaagcccacctgtacgggttagaaccattcacaacatatcgcattggtgttgtggctgcaaaccatgcaggagaaattttaagcccttggactctgattcaaaccttagaatcttccccaagtggactgagaaactttatagtagaacagaaagagaatggccgggcattgctactacagtggtcagaacctatgagaaccaatggtgtgattaagacatacaacatcttcagtgacgggttcctggagtactctggtttgaatcgtcagtttctcttccgccgcctggatcctttcactctctacacactgaccctggaggcctgcaccagagcaggttgtgcacactcggcgcctcagcctctgtggacagatgaagcccctccagactctcagctggctcctactgtccactctgtgaagtccaccagtgttgagctgagctggtctgagcctgttaacccaaatggaaaaataattcgctatgaagtgattcgcagatgcttcgagggaaaagcttggggaaatcagacaatccaggccgacgagaaaattgttttcacagaatataacactgaaaggaatacatttatgtataatgacacaggtttgcaaccatggacgcagtgtgaatataaaatctacacttggaattcagctgggcatacctgtagctcttggaatgtggtgaggacattgcaagcacctccagaaggtctctctccacctgtgatatcctatgtttctatgaatccccaaaaactgctgatttcctggatcccaccagaacagtctaatggtattatccagtcctataggcttcaaaggaatgaaatgctctatccttttagctttgatcctgtgactttcaattacactgatgaagagcttcttcctttttccacctatagctatgcactccaagcctgcacgagtggaggatgctccaccagcaaacccaccagcatcacaactctggaggctgctccatcagaagtcagccctccagatctttgggccgtcagtgccactcaaatgaatgtatgttggtcaccgcccacagtgcaaaatggaaagattactaaatatttagttagatatgataataaagagtcccttgctggccagggcctgtgcctgctggtttcccacctgcagccttactctcagtataacttctcccttgtagcctgcacgaatggaggttgcacagctagtgtgtcaaaatctgcctggacaatggaggccctgccagagaacatggactctccaacattgcaagtcacaggctcagaatcaatagaaatcacctggaaacctccaagaaacccaaatggccagatcagaagttatgaacttaggagggatggaaccattgtatatacaggcttggaaacacgctatcgtgattttactctcaccccaggtgtggagtatagctacacagtaactgccagcaacagccaagggggtattttgagtcctcttgtcaaagatcgaaccagcccctcagcaccctcagggatggaacctccaaaattgcaggccaggggtcctcaggagatcttagtgaactgggaccctccagtgagaacaaatggtgatatcatcaattataccctcttcatccgtgaactatttgaaagagaaactaaaatcatacacataaacacaactcataattcttttggtatgcagtcatatatagtaaaccagctgaagccatttcacaggtatgaaatacgaattcaagcgtgcaccaccctgggatgtgcatcaagtgactggacattcatacagacccctgagattgcacctttgatgcaaccccctccacatctggaggtacaaatggctccaggaggattccagccaactgtttctcttttgtggacaggaccgctgcagccaaatggaaaagttttgtattacgaattatacagaagacaaatagcaactcagcctagaaaatccaatccagtcctaatctataacggaagctcaacatcttttatagattccgaactattgcctttcacagagtatgagtatcaggtctgggcagtgaattctgcaggaaaagcccccagtagctggacatggtgcagaaccgggccagccccaccagaaggtctcagagcccccacgttccatgtgatctcttctacccaagcagtggtcaacatcagtgcccctgggaagcccaacgggatcgtcagtctctacaggctgttctccagcagcgcccatggggctgagacagtgctatccgaaggcatggccacccagcagactctccatggccttcaagccttcactaactactctattggagtagaggcctgcacctgcttcaactgttgcagcaaaggaccgacagctgaactgagaacccatcctgccccaccctcaggactgtcctctccacaaatcgggacgctggcctcaaggacggcctccttccggtggagtccccccatgttccccaatggtgtcattcacagctatgaactccaattccacgtggcttgccctcctgactcagccctcccctgtactcccagccaaatagaaacaaagtacacggggctggggcagaaagccagccttgggggtctccagccctacaccacatacaagctgagagtggtggcacacaacgaggtgggcagtacggcttccgagtggatcagtttcaccacccaaaaagaattgcctcagtaccgagccccattttcggtggacagcaatttgtctgtggtgtgtgtgaactggagtgacaccttcctcctgaacggccaactgaaggagtacgtgttaaccgacggagggcgacgcgtgtacagcggcttggacaccaccctctacataccgagaacggcggacaaaaccttctttttccaggtcatctgcacgactgacgaaggaagtgttaagacgccgttgatccaatatgatacctctactggacttggcttggtcctaacaactcctgggaaaaagaagggatcgcggagcaaaagcacagagttctacagcgagctgtggttcatagtgttaatggcgatgctgggcttgatcttgttggccatttttctgtccctgatactacaaagaaaaatccacaaagagccatatatcagagaaagacctcccttggtacctcttcagaagaggatgtctccattgaatgtttacccaccgggggaaaaccatatggggttagccgataccaaaattccccggtctgggacacctgtgagtatccgcagcaaccggagtgcatgtgtcctgcgcatcccgagtcaaaaccaaaccagcctaacctactcccagggttctcttcaccgcagcgtcagccagctcatggacattcaagacaagaaagtcttgatggacaactcactgtgggaagccatcatgggccacaacagtggactgtatgtggatgaagaggacctgatgaacgccatcaaggatttcagctcagtgactaaggaacgcaccacattcacagacacccacctgtaaaacttgtttattgcagcttataatggttacaaataaagcaatagcatcacaaatttcacaaataaagcatttttttcactgcattctagttgtggtttgtccaaactcatcaatgtatcttatcatgtctggatcgagagtactcttaaatgttttgg

SEQ ID NO: 8 - DNA, 4913 bp, Artificial Sequence
  Construct
agagcagctgaaattacaatggcttggagacaatgttgcctgtgcaagaaaaactaccaagtcaagtttctggaaagggggcaaagagtttgcaatttgtcacaaatttaggactaagcaattgatacaaaaactagtaatcattgttcaagtctcttgtgcatcaccttaccacaattcttctttctttttaaatatagatacacttacaagttagaagtcaaaactggaggtggcagcagtgctagtgatgattacattgttcaaacacctatgtcaacaccagaagaaatctatcctccatataatatcacagtaattgggccttattctatatttgtagcttggataccaccagggatcctcatccccgaaattcctgtggagtacaatgtcttactcaatgatggaagtgtaacacctctggccttctccgttggtcatcatcaatccacccttctggaaaatttgactccattcacacagtatgagataaggatacaagcatgtcaaaatggaagttgtggagttagcagtaggatgtttgtcaaaacacctgaagcagccccaatggatcttaattctcctgttcttaaggcactggggtcagcttgcatagagattaagtggatgccacctgaaaaaccaaatggaatcatcatcaactactttatttacagacgccctgctggcattgaagaggagtctgttttatttgtctggtcagaaggagcccttgaatttatggatgaaggagacaccctgaggcctttcacactctacgaatatcgggtcagagcctgtaactccaagggttcagtggagagtctgtggtcattaacacaaactctggaagctccacctcaagattttccagctccttgggctcaagccacgagtgctcattcagttctgttgaattggacaaagccagaatctcccaatggcattatctcccattaccgtgtggtctaccaggagagacccgacgatcctacatttaacagccctaccgtgcatgctttcacagtgaagggaacaagccatcaagcccacctgtacgggttagaaccattcacaacatatcgcattggtgttgtggctgcaaaccatgcaggagaaattttaagcccttggactctgattcaaaccttagaatcttccccaagtggactgagaaactttatagtagaacagaaagagaatggccgggcattgctactacagtggtcagaacctatgagaaccaatggtgtgattaagacatacaacatcttcagtgacgggttcctggagtactctggtttgaatcgtcagtttctcttccgccgcctggatcctttcactctctacacactgaccctggaggcctgcaccagagcaggttgtgcacactcggcgcctcagcctctgtggacagatgaagcccctccagactctcagctggctcctactgtccactctgtgaagtccaccagtgttgagctgagctggtctgagcctgttaacccaaatggaaaaataattcgctatgaagtgattcgcagatgcttcgagggaaaagcttggggaaatcagacaatccaggccgacgagaaaattgttttcacagaatataacactgaaaggaatacatttatgtataatgacacaggtttgcaaccatggacgcagtgtgaatataaaatctacacttggaattcagctgggcatacctgtagctcttggaatgtggtgaggacattgcaagcacctccagaaggtctctctccacctgtgatatcctatgtttctatgaatccccaaaaactgctgatttcctggatcccaccagaacagtctaatggtattatccagtcctataggcttcaaaggaatgaaatgctctatccttttagctttgatcctgtgactttcaattacactgatgaagagcttcttcctttttccacctatagctatgcactccaagcctgcacgagtggaggatgctccaccagcaaacccaccagcatcacaactctggaggctgctccatcagaagtcagccctccagatctttgggccgtcagtgccactcaaatgaatgtatgttggtcaccgcccacagtgcaaaatggaaagattactaaatatttagttagatatgataataaagagtcccttgctggccagggcctgtgcctgctggtttcccacctgcagccttactctcagtataacttctcccttgtagcctgcacgaatggaggttgcacagctagtgtgtcaaaatctgcctggacaatggaggccctgccagagaacatggactctccaacattgcaagtcacaggctcagaatcaatagaaatcacctggaaacctccaagaaacccaaatggccagatcagaagttatgaacttaggagggatggaaccattgtatatacaggcttggaaacacgctatcgtgattttactctcaccccaggtgtggagtatagctacacagtaactgccagcaacagccaagggggtattttgagtcctcttgtcaaagatcgaaccagcccctcagcaccctcagggatggaacctccaaaattgcaggccaggggtcctcaggagatcttagtgaactgggaccctccagtgagaacaaatggtgatatcatcaattataccctcttcatccgtgaactatttgaaagagaaactaaaatcatacacataaacacaactcataattcttttggtatgcagtcatatatagtaaaccagctgaagccatttcacaggtatgaaatacgaattcaagcgtgcaccaccctgggatgtgcatcaagtgactggacattcatacagacccctgagattgcacctttgatgcaaccccctccacatctggaggtacaaatggctccaggaggattccagccaactgtttctcttttgtggacaggaccgctgcagccaaatggaaaagttttgtattacgaattatacagaagacaaatagcaactcagcctagaaaatccaatccagtcctaatctataacggaagctcaacatcttttatagattccgaactattgcctttcacagagtatgagtatcaggtctgggcagtgaattctgcaggaaaagcccccagtagctggacatggtgcagaaccgggccagccccaccagaaggtctcagagcccccacgttccatgtgatctcttctacccaagcagtggtcaacatcagtgcccctgggaagcccaacgggatcgtcagtctctacaggctgttctccagcagcgcccatggggctgagacagtgctatccgaaggcatggccacccagcagactctccatggccttcaagccttcactaactactctattggagtagaggcctgcacctgcttcaactgttgcagcaaaggaccgacagctgaactgagaacccatcctgccccaccctcaggactgtcctctccacaaatcgggacgctggcctcaaggacggcctccttccggtggagtccccccatgttccccaatggtgtcattcacagctatgaactccaattccacgtggcttgccctcctgactcagccctcccctgtactcccagccaaatagaaacaaagtacacggggctggggcagaaagccagccttgggggtctccagccctacaccacatacaagctgagagtggtggcacacaacgaggtgggcagtacggcttccgagtggatcagtttcaccacccaaaaagaattgcctcagtaccgagccccattttcggtggacagcaatttgtctgtggtgtgtgtgaactggagtgacaccttcctcctgaacggccaactgaaggagtacgtgttaaccgacggagggcgacgcgtgtacagcggcttggacaccaccctctacataccgagaacggcggacaaaaccttctttttccaggtcatctgcacgactgacgaaggaagtgttaagacgccgttgatccaatatgatacctctactggacttggcttggtcctaacaactcctgggaaaaagaagggatcgcggagcaaaagcacagagttctacagcgagctgtggttcatagtgttaatggcgatgctgggcttgatcttgttggccatttttctgtccctgatactacaaagaaaaatccacaaagagccatatatcagagaaagacctcccttggtacctcttcagaagaggatgtctccattgaatgtttacccaccgggggaaaaccatatggggttagccgataccaaaattccccggtctgggacacctgtgagtatccgcagcaaccggagtgcatgtgtcctgcgcatcccgagtcaaaaccaaaccagcctaacctactcccagggttctcttcaccgcagcgtcagccagctcatggacattcaagacaagaaagtcttgatggacaactcactgtgggaagccatcatgggccacaacagtggactgtatgtggatgaagaggacctgatgaacgccatcaaggatttcagctcagtgactaaggaacgcaccacattcacagacacccacctgtaaaacttgtttattgcagcttataatggttacaaataaagcaatagcatcacaaatttcacaaataaagcatttttttcactgcattctagttgtggtttgtccaaactcatcaatgtatcttatcatgtctggatcgtaaaaaaaaaaaagaagtatgtgtgtgtgtgtgtaaacattttaaaggaattaattagagataagaatagaactgttaatttagtaaatcagaaagacatagtcggtctcctggataaatatgaacagaaaaatctaaaccacacttctaagtgtatagacgcatgagtacatacatacatacgtagagatataggtat

SEQ ID NO: 9 - DNA, 4797 bp, Artificial Sequence
  Construct
gactataataaactagagaaacttgagttcagacaagtttccttattattccttatttccagacaatatgccttattgtttatgtctatataaatatgtgactaattaatgggttttccaaaaataattttctatttaaatgttcaaatcccataaaaatttatttaaaacacatgtacaagtatatatgcaaaaggacaggttaaaataattttcatgatatcattaaacttctgtatgaatatgtagttcttttccttgcttgaaaaataataaagacctcaattttttttttttcaaggaagttgtggagttagcagtaggatgtttgtcaaaacacctgaagcagccccaatggatcttaattctcctgttcttaaggcactggggtcagcttgcatagagattaagtggatgccacctgaaaaaccaaatggaatcatcatcaactactttatttacagacgccctgctggcattgaagaggagtctgttttatttgtctggtcagaaggagcccttgaatttatggatgaaggagacaccctgaggcctttcacactctacgaatatcgggtcagagcctgtaactccaagggttcagtggagagtctgtggtcattaacacaaactctggaagctccacctcaagattttccagctccttgggctcaagccacgagtgctcattcagttctgttgaattggacaaagccagaatctcccaatggcattatctcccattaccgtgtggtctaccaggagagacccgacgatcctacatttaacagccctaccgtgcatgctttcacagtgaagggaacaagccatcaagcccacctgtacgggttagaaccattcacaacatatcgcattggtgttgtggctgcaaaccatgcaggagaaattttaagcccttggactctgattcaaaccttagaatcttccccaagtggactgagaaactttatagtagaacagaaagagaatggccgggcattgctactacagtggtcagaacctatgagaaccaatggtgtgattaagacatacaacatcttcagtgacgggttcctggagtactctggtttgaatcgtcagtttctcttccgccgcctggatcctttcactctctacacactgaccctggaggcctgcaccagagcaggttgtgcacactcggcgcctcagcctctgtggacagatgaagcccctccagactctcagctggctcctactgtccactctgtgaagtccaccagtgttgagctgagctggtctgagcctgttaacccaaatggaaaaataattcgctatgaagtgattcgcagatgcttcgagggaaaagcttggggaaatcagacaatccaggccgacgagaaaattgttttcacagaatataacactgaaaggaatacatttatgtataatgacacaggtttgcaaccatggacgcagtgtgaatataaaatctacacttggaattcagctgggcatacctgtagctcttggaatgtggtgaggacattgcaagcacctccagaaggtctctctccacctgtgatatcctatgtttctatgaatccccaaaaactgctgatttcctggatcccaccagaacagtctaatggtattatccagtcctataggcttcaaaggaatgaaatgctctatccttttagctttgatcctgtgactttcaattacactgatgaagagcttcttcctttttccacctatagctatgcactccaagcctgcacgagtggaggatgctccaccagcaaacccaccagcatcacaactctggaggctgctccatcagaagtcagccctccagatctttgggccgtcagtgccactcaaatgaatgtatgttggtcaccgcccacagtgcaaaatggaaagattactaaatatttagttagatatgataataaagagtcccttgctggccagggcctgtgcctgctggtttcccacctgcagccttactctcagtataacttctcccttgtagcctgcacgaatggaggttgcacagctagtgtgtcaaaatctgcctggacaatggaggccctgccagagaacatggactctccaacattgcaagtcacaggctcagaatcaatagaaatcacctggaaacctccaagaaacccaaatggccagatcagaagttatgaacttaggagggatggaaccattgtatatacaggcttggaaacacgctatcgtgattttactctcaccccaggtgtggagtatagctacacagtaactgccagcaacagccaagggggtattttgagtcctcttgtcaaagatcgaaccagcccctcagcaccctcagggatggaacctccaaaattgcaggccaggggtcctcaggagatcttagtgaactgggaccctccagtgagaacaaatggtgatatcatcaattataccctcttcatccgtgaactatttgaaagagaaactaaaatcatacacataaacacaactcataattcttttggtatgcagtcatatatagtaaaccagctgaagccatttcacaggtatgaaatacgaattcaagcgtgcaccaccctgggatgtgcatcaagtgactggacattcatacagacccctgagattgcacctttgatgcaaccccctccacatctggaggtacaaatggctccaggaggattccagccaactgtttctcttttgtggacaggaccgctgcagccaaatggaaaagttttgtattacgaattatacagaagacaaatagcaactcagcctagaaaatccaatccagtcctaatctataacggaagctcaacatcttttatagattccgaactattgcctttcacagagtatgagtatcaggtctgggcagtgaattctgcaggaaaagcccccagtagctggacatggtgcagaaccgggccagccccaccagaaggtctcagagcccccacgttccatgtgatctcttctacccaagcagtggtcaacatcagtgcccctgggaagcccaacgggatcgtcagtctctacaggctgttctccagcagcgcccatggggctgagacagtgctatccgaaggcatggccacccagcagactctccatggccttcaagccttcactaactactctattggagtagaggcctgcacctgcttcaactgttgcagcaaaggaccgacagctgaactgagaacccatcctgccccaccctcaggactgtcctctccacaaatcgggacgctggcctcaaggacggcctccttccggtggagtccccccatgttccccaatggtgtcattcacagctatgaactccaattccacgtggcttgccctcctgactcagccctcccctgtactcccagccaaatagaaacaaagtacacggggctggggcagaaagccagccttgggggtctccagccctacaccacatacaagctgagagtggtggcacacaacgaggtgggcagtacggcttccgagtggatcagtttcaccacccaaaaagaattgcctcagtaccgagccccattttcggtggacagcaatttgtctgtggtgtgtgtgaactggagtgacaccttcctcctgaacggccaactgaaggagtacgtgttaaccgacggagggcgacgcgtgtacagcggcttggacaccaccctctacataccgagaacggcggacaaaaccttctttttccaggtcatctgcacgactgacgaaggaagtgttaagacgccgttgatccaatatgatacctctactggacttggcttggtcctaacaactcctgggaaaaagaagggatcgcggagcaaaagcacagagttctacagcgagctgtggttcatagtgttaatggcgatgctgggcttgatcttgttggccatttttctgtccctgatactacaaagaaaaatccacaaagagccatatatcagagaaagacctcccttggtacctcttcagaagaggatgtctccattgaatgtttacccaccgggggaaaaccatatggggttagccgataccaaaattccccggtctgggacacctgtgagtatccgcagcaaccggagtgcatgtgtcctgcgcatcccgagtcaaaaccaaaccagcctaacctactcccagggttctcttcaccgcagcgtcagccagctcatggacattcaagacaagaaagtcttgatggacaactcactgtgggaagccatcatgggccacaacagtggactgtatgtggatgaagaggacctgatgaacgccatcaaggatttcagctcagtgactaaggaacgcaccacattcacagacacccacctgtaaaacttgtttattgcagcttataatggttacaaataaagcaatagcatcacaaatttcacaaataaagcatttttttcactgcattctagttgtggtttgtccaaactcatcaatgtatcttatcatgtctggatcgtaagattggctgttactattatttttagttatttaagaatgcgtactgctccaacacagcagaatcaagagcattttatatttccataaaagaatgaatgggaattcatgttgtgtttttttttgttttgttttgtatgtttgtttgtttgtttgtagcacctaccagtgaggactaagactggtgctcaaacttttacaaattaaccaaggaaaaaagccataactgccatataacatttttgattgagatctgtttgaaaactgagaccttatagcccacataggcttatatttagt

SEQ ID NO: 10 - DNA, 23 bp, Artificial Sequence
  gRNA target
gagagtactcttaaatgttttgg

SEQ ID NO: 11 - DNA, 23 bp, Artificial Sequence
  gRNA target
ttgttcaagtctcttgtgcatgg

SEQ ID NO: 12 - DNA, 23 bp, Artificial Sequence
  gRNA target
aactacatattcatacagaaggg

SEQ ID NO: 13 - protein, 936 aa, Homo sapiens
MNCPVLSLGSGFLFQVIEMLIFAYFASISLTESRGLFPRLENVGAFKKVSIVPTQAVCGLPDRSTFCHSSAAAESIQFCTQRFCIQDCPYRSSHPTYTALFSAGLSSCITPDKNDLHPNAHSNSASFIFGNHKSCFSSPPSPKLMASFTLAVWLKPEQQGVMCVIEKTVDGQIVFKLTISEKETMFYYRTVNGLQPPIKVMTLGRILVKKWIHLSVQVHQTKISFFINGVEKDHTPFNARTLSGSITDFASGTVQIGQSLNGLEQFVGRMQDFRLYQVALTNREILEVFSGDLLRLHAQSHCRCPGSHPRVHPLAQRYCIPNDAGDTADNRVSRLNPEAHPLSFVNDNDVGTSWVSNVFTNITQLNQGVTISVDLENGQYQVFYIIIQFFSPQPTEIRIQRKKENSLDWEDWQYFARNCGAFGMKNNGDLEKPDSVNCLQLSNFTPYSRGNVTFSILTPGPNYRPGYNNFYNTPSLQEFVKATQIRFHFHGQYYTTETAVNLRHRYYAVDEITISGRCQCHGHADNCDTTSQPYRCLCSQESFTEGLHCDRCLPLYNDKPFRQGDQVYAFNCKPCQCNSHSKSCHYNISVDPFPFEHFRGGGGVCDDCEHNTTGRNCELCKDYFFRQVGADPSAIDVCKPCDCDTVGTRNGSILCDQIGGQCNCKRHVSGRQCNQCQNGFYNLQELDPDGCSPCNCNTSGTVDGDITCHQNSGQCKCKANVIGLRCDHCNFGFKFLRSFNDVGCEPCQCNLHGSVNKFCNPHSGQCECKKEAKGLQCDTCRENFYGLDVTNCKACDCDTAGSLPGTVCNAKTGQCICKPNVEGRQCNKCLEGNFYLRQNNSFLCLPCNCDKTGTINGSLLCNKSTGQCPCKLGVTGLRCNQCEPHRYNLTIDNFQHCQMCECDSLGTLPGTICDPISGQCLCVPNRQGRRCNQCQP

SEQ ID NO: 14 - protein, 1180 aa, Homo sapiens
GTSHQAHLYGLEPFTTYRIGVVAANHAGEILSPWTLIQTLESSPSGLRNFIVEQKENGRALLLQWSEPMRTNGVIKTYNIFSDGFLEYSGLNRQFLFRRLDPFTLYTLTLEACTRAGCAHSAPQPLWTDEAPPDSQLAPTVHSVKSTSVELSWSEPVNPNGKIIRYEVIRRCFEGKAWGNQTIQADEKIVFTEYNTERNTFMYNDTGLQPWTQCEYKIYTWNSAGHTCSSWNVVRTLQAPPEGLSPPVISYVSMNPQKLLISWIPPEQSNGIIQSYRLQRNEMLYPFSFDPVTFNYTDEELLPFSTYSYALQACTSGGCSTSKPTSITTLEAAPSEVSPPDLWAVSATQMNVCWSPPTVQNGKITKYLVRYDNKESLAGQGLCLLVSHLQPYSQYNFSLVACTNGGCTASVSKSAWTMEALPENMDSPTLQVTGSESIEITWKPPRNPNGQIRSYELRRDGTIVYTGLETRYRDFTLTPGVEYSYTVTASNSQGGILSPLVKDRTSPSAPSGMEPPKLQARGPQEILVNWDPPVRTNGDIINYTLFIRELFERETKIIHINTTHNSFGMQSYIVNQLKPFHRYEIRIQACTTLGCASSDWTFIQTPEIAPLMQPPPHLEVQMAPGGFQPTVSLLWTGPLQPNGKVLYYELYRRQIATQPRKSNPVLIYNGSSTSFIDSELLPFTEYEYQVWAVNSAGKAPSSWTWCRTGPAPPEGLRAPTFHVISSTQAVVNISAPGKPNGIVSLYRLFSSSAHGAETVLSEGMATQQTLHGLQAFTNYSIGVEACTCFNCCSKGPTAELRTHPAPPSGLSSPQIGTLASRTASFRWSPPMFPNGVIHSYELQFHVACPPDSALPCTPSQIETKYTGLGQKASLGGLQPYTTYKLRVVAHNEVGSTASEWISFTTQKELPQYRAPFSVDSNLSVVCVNWSDTFLLNGQLKEYVLTDGGRRVYSGLDTTLYIPRTADKTFFFQVICTTDEGSVKTPLIQYDTSTGLGLVLTTPGKKKGSRSKSTEFYSELWFIVLMAMLGLILLAIFLSLILQRKIHKEPYIRERPPLVPLQKRMSPLNVYPPGENHMGLADTKIPRSGTPVSIRSNRSACVLRIPSQNQTSLTYSQGSLHRSVSQLMDIQDKKVLMDNSLWEAIMGHNSGLYVDEEDLMNAIKDFSSVTKERTTFTDTHL

SEQ ID NO: 15 - DNA, 4750 bp, Artificial Sequence
  Construct
caccatgctgtacaatagagctccagaacttattcattctgtctagctgaaactttgtactcagcttaaccttttattaaacatctttagagatttcttatctttagaaaaacaactaatttgttatatgtaattctactataattttaaatgagcacatttgttaaaatagtttttaagatttgttaaagagaaaaagagctccagcatatgtaacagaaacaacatttgcattaagcatttttctttgcattaagtaataattaaaaatttatgaagttcatcgcaaacagttgtatattaaagctaaattaaatattgtcattgaattttgagagtaagattggccccctatggcattgcttgtgagaaaacactcaatattttgtgttcgtatcatctgcagtagcattgtttgtgtctcgtctatcttgaatgaaatcattttcccatcctcaccttttaaatatattttatctttagcgttacataacttacggtaaatggcccgcctggctgaccgcccaacgacccccgcccattgacgtcaataatgacgtatgttcccatagtaacgccaatagggactttccattgacgtcaatgggtggagtatttacggtaaactgcccacttggcagtacatcaagtgtatcatatgccaagtacgccccctattgacgtcaatgacggtaaatggcccgcctggcattatgcccagtacatgaccttatgggactttcctacttggcagtacatctacgtattagtcatcgctattaccatggtgatgcggttttggcagtacatcaatgggcgtggatagcggtttgactcacggggatttccaagtctccaccccattgacgtcaatgggagtttgttttggcaccaaaatcaacgggactttccaaaatgtcgtaacaactccgccccattgacgcaaatgggcggtaggcgtgtacggtgggaggtctatataagcagagctctctggctaactagagaacccactgcttactggcttatcgaaatgccaccatgaattgcccagttctttcattgggctctggcttcttgtttcaggtcattgaaatgttgatctttgcctattttgcttcaatatccttgactgagtcacgaggtcttttcccaaggctggagaacgtgggagctttcaagaaagtttccatcgtgccaacccaagcagtatgtggactcccagaccgaagcactttttgtcacagctctgctgctgctgaaagtattcagttctgtacccagcggttttgtattcaggattgcccatacagatcttcacaccctacctacactgcccttttctcagcaggcctcagtagctgcatcacaccagacaagaatgatctgcatcctaacgcccatagcaattctgcaagttttatttttggaaatcacaagagctgcttttcttctcctccttctccaaagctgatggcatcatttaccttagctgtatggctgaaacctgagcaacaaggtgtaatgtgtgttatagaaaagacagtagatgggcagattgtgttcaaacttacaatatctgagaaagagaccatgttttattatcgcacagtaaatggtttgcaacctccaataaaagtaatgacactggggagaattcttgtgaagaaatggattcatcttagtgtgcaggtgcatcagacaaaaatcagcttctttatcaatggcgtggagaaggatcatacacctttcaatgcaagaactctaagtggttcaattacagattttgcatctggtactgtgcaaataggacagagtttaaatggtttagagcagtttgtcggaagaatgcaagattttcgattataccaagtggcacttacaaacagagagattctggaagtcttctctggagatcttctcagattgcatgcccaatcacattgccgttgccctggcagccacccgcgggtccaccctttggcacagcggtactgcattcctaatgatgcaggagacacagctgataatagagtgtcacggttgaatcctgaagcccatcctctctcttttgtcaatgataatgatgttggtacttcatgggtttcaaatgtgtttacaaacattacacagcttaatcaaggagtgactatttcagttgatttggaaaatggacagtatcaggtgttttatattatcattcagttctttagtccacaaccaacggaaataaggattcaaaggaagaaggaaaatagtttagattgggaggactggcaatattttgccaggaattgtggtgcttttggaatgaaaaacaatggagatttggaaaaacctgattctgtcaactgtcttcagctttccaattttactccatattcccgtggcaatgtcacatttagcatcctgacacctggaccaaattatcgtcctggatacaataacttctataataccccatctcttcaagagttcgtaaaagccacgcaaataaggtttcattttcatgggcagtactatacaactgagactgctgttaacctcagacacagatattatgcagtggacgaaatcaccattagtgggagatgtcagtgccatggtcatgccgataactgcgacacaacaagccagccatatagatgcctctgctcccaggagagcttcactgaaggacttcattgtgatcgctgcttgcctctttataatgacaagcctttccgccaaggtgatcaagtttacgctttcaattgtaaaccttgtcaatgcaacagccattccaaaagctgccattacaacatctctgtagacccatttccttttgagcacttcagagggggaggaggagtttgtgatgattgtgagcataacactacaggaaggaactgtgagctgtgcaaggattactttttccgacaagttggtgcagatccttcggccatagatgtttgcaaaccctgtgactgtgatacagttggcactagaaatggtagcattctttgtgatcagattggaggacagtgtaattgtaagagacacgtgtctggcaggcagtgcaatcagtgccagaatggattctacaatctacaagagttggatcctgatggctgcagtccctgtaactgcaatacctctgggacagtggatggagatattacctgtcaccaaaattcaggccagtgcaagtgcaaagcaaacgttattgggcttaggtgtgatcattgcaattttggatttaaatttctccgaagctttaatgatgttggatgtgagccctgccagtgtaacctccatggctcagtgaacaaattctgcaatcctcactctgggcagtgtgagtgcaaaaaagaagccaaaggacttcagtgtgacacctgcagagaaaacttttatgggttagatgtcaccaattgtaaggcctgtgactgtgacacagctggatccctccctgggactgtctgtaatgctaagacagggcagtgcatctgcaagcccaatgttgaagggagacagtgcaataaatgtttggagggaaacttctacctacggcaaaataattctttcctctgtctgccttgcaactgtgataagactgggacaataaatggctctctgctgtgtaacaaatcaacaggacaatgtccttgcaaattaggggtaacaggtcttcgctgtaatcagtgtgagcctcacaggtacaatttgaccattgacaattttcaacactgccagatgtgtgagtgtgatagtttggggacattacctgggaccatttgtgacccaatcagtggccagtgcctgtgtgtgcctaatcgtcaaggaagaaggtgtaatcagtgtcaaccaggtaagaaagaaatgtattacattttcagtgcacaatgacattccttttgttaacttaggtaacttctccctgtttctggtttgtggcttctacaaattttatttccaaaatcattactgtatttatatcattatccaacacatatataactatttaacttattcaaaattatctgcatatttatgttactattttgagaggatactttagataaaactcagccgatcggatttatttcataattgagactcaatttctacacttgaagtaaatctcctttttaacagttttttaaaaatcagatcaacaagagtcaattttattttccagagaaaggaaaatttgagttgaatatccatacaatgccaaatattcaaatgatgaactaaatctctgaataaagctggctaaatgtttttgctgaagaggctatatgttctagttttatatagaaatacctagaattgtttccacatgccatcaaattaataaaataggccactgtttaatctcattatatacaaacttatctttccatctctttcccaattgggagagggatagaccccatctatggctctccttacatttaagattttaactaaaatactataccttctttacaataaattcattatgatatgatgataaatataagtacttatccgttgtttaacagctgtgctaattgttgtcctgtcagccaatattagctctgagttatatgggtctataaaaatgagcatgataccaactcaaaagtgtgatttgcttgccagagaaggagtagaacaaaagttctgttaacatagcaaagaatccagcctaggataattgggccatgcttttcctttggcattggtcagtgtgtaagatcaaagagacaagaaggaattgatg

SEQ ID NO: 16 - DNA, 4750 bp, Artificial Sequence
  Construct
tttctatttcgcaattggagagtcacttgaaaagataattttatgggtacctaatctaaatgtttagctgacaggaacactgcttttgtaaaagcaaaatttacagcattcttaattgaacaactggattcaaactaatccataagatatattgtgggatgtaaaaaagcaatataatatctttttttgctattaattagtttataaagagaaagctttatacgggttttaccaggaacagtagttttataaagatcttttctattttcctttattttatgttgattctttgtttgtttagctcaagcattcttttcaatatattggctaaaacaagccgtcttactctacaatgctattggtaggtgtaacttatactatgaattattaatcaaaacactattctctttgatggtttatttgccttgttttcagcgttacataacttacggtaaatggcccgcctggctgaccgcccaacgacccccgcccattgacgtcaataatgacgtatgttcccatagtaacgccaatagggactttccattgacgtcaatgggtggagtatttacggtaaactgcccacttggcagtacatcaagtgtatcatatgccaagtacgccccctattgacgtcaatgacggtaaatggcccgcctggcattatgcccagtacatgaccttatgggactttcctacttggcagtacatctacgtattagtcatcgctattaccatggtgatgcggttttggcagtacatcaatgggcgtggatagcggtttgactcacggggatttccaagtctccaccccattgacgtcaatgggagtttgttttggcaccaaaatcaacgggactttccaaaatgtcgtaacaactccgccccattgacgcaaatgggcggtaggcgtgtacggtgggaggtctatataagcagagctctctggctaactagagaacccactgcttactggcttatcgaaatgccaccatgaattgcccagttctttcattgggctctggcttcttgtttcaggtcattgaaatgttgatctttgcctattttgcttcaatatccttgactgagtcacgaggtcttttcccaaggctggagaacgtgggagctttcaagaaagtttccatcgtgccaacccaagcagtatgtggactcccagaccgaagcactttttgtcacagctctgctgctgctgaaagtattcagttctgtacccagcggttttgtattcaggattgcccatacagatcttcacaccctacctacactgcccttttctcagcaggcctcagtagctgcatcacaccagacaagaatgatctgcatcctaacgcccatagcaattctgcaagttttatttttggaaatcacaagagctgcttttcttctcctccttctccaaagctgatggcatcatttaccttagctgtatggctgaaacctgagcaacaaggtgtaatgtgtgttatagaaaagacagtagatgggcagattgtgttcaaacttacaatatctgagaaagagaccatgttttattatcgcacagtaaatggtttgcaacctccaataaaagtaatgacactggggagaattcttgtgaagaaatggattcatcttagtgtgcaggtgcatcagacaaaaatcagcttctttatcaatggcgtggagaaggatcatacacctttcaatgcaagaactctaagtggttcaattacagattttgcatctggtactgtgcaaataggacagagtttaaatggtttagagcagtttgtcggaagaatgcaagattttcgattataccaagtggcacttacaaacagagagattctggaagtcttctctggagatcttctcagattgcatgcccaatcacattgccgttgccctggcagccacccgcgggtccaccctttggcacagcggtactgcattcctaatgatgcaggagacacagctgataatagagtgtcacggttgaatcctgaagcccatcctctctcttttgtcaatgataatgatgttggtacttcatgggtttcaaatgtgtttacaaacattacacagcttaatcaaggagtgactatttcagttgatttggaaaatggacagtatcaggtgttttatattatcattcagttctttagtccacaaccaacggaaataaggattcaaaggaagaaggaaaatagtttagattgggaggactggcaatattttgccaggaattgtggtgcttttggaatgaaaaacaatggagatttggaaaaacctgattctgtcaactgtcttcagctttccaattttactccatattcccgtggcaatgtcacatttagcatcctgacacctggaccaaattatcgtcctggatacaataacttctataataccccatctcttcaagagttcgtaaaagccacgcaaataaggtttcattttcatgggcagtactatacaactgagactgctgttaacctcagacacagatattatgcagtggacgaaatcaccattagtgggagatgtcagtgccatggtcatgccgataactgcgacacaacaagccagccatatagatgcctctgctcccaggagagcttcactgaaggacttcattgtgatcgctgcttgcctctttataatgacaagcctttccgccaaggtgatcaagtttacgctttcaattgtaaaccttgtcaatgcaacagccattccaaaagctgccattacaacatctctgtagacccatttccttttgagcacttcagagggggaggaggagtttgtgatgattgtgagcataacactacaggaaggaactgtgagctgtgcaaggattactttttccgacaagttggtgcagatccttcggccatagatgtttgcaaaccctgtgactgtgatacagttggcactagaaatggtagcattctttgtgatcagattggaggacagtgtaattgtaagagacacgtgtctggcaggcagtgcaatcagtgccagaatggattctacaatctacaagagttggatcctgatggctgcagtccctgtaactgcaatacctctgggacagtggatggagatattacctgtcaccaaaattcaggccagtgcaagtgcaaagcaaacgttattgggcttaggtgtgatcattgcaattttggatttaaatttctccgaagctttaatgatgttggatgtgagccctgccagtgtaacctccatggctcagtgaacaaattctgcaatcctcactctgggcagtgtgagtgcaaaaaagaagccaaaggacttcagtgtgacacctgcagagaaaacttttatgggttagatgtcaccaattgtaaggcctgtgactgtgacacagctggatccctccctgggactgtctgtaatgctaagacagggcagtgcatctgcaagcccaatgttgaagggagacagtgcaataaatgtttggagggaaacttctacctacggcaaaataattctttcctctgtctgccttgcaactgtgataagactgggacaataaatggctctctgctgtgtaacaaatcaacaggacaatgtccttgcaaattaggggtaacaggtcttcgctgtaatcagtgtgagcctcacaggtacaatttgaccattgacaattttcaacactgccagatgtgtgagtgtgattccttggggacattacctgggaccatttgtgacccaatcagtggccagtgcctgtgtgtgcctaatcgtcaaggaagaaggtgtaatcagtgtcaaccaggtttttatatttctccaggcaatgccactggctgcctgccatgctcatgccatacaactggtgcagttaatcacatctgtaatagcctgactggtcagtgtgtttgccaagatgcttccattgctgggcaacgttgtgaccaatgcaaagaccattactttggatttgatcctcagactggaagatgtcagccttgtaattgtcatctctcaggagccttgaatgaaacgtgccacttggtcacaggccagtgtttctgtaaacaatttgtcactggctcaaagtgtgatgcttgtgttcccagtgcaagccacttggatgtcaacaatctattgggttgcagcaaaagtaagtgaactctggttcagtgctggtgtgtgaaacagcatcatacaggggactgcatctcattgttttctttctccatttagaacccatcagaaaggcttagtacaatgtgaagaacgtaggtaagagatggaaaaaaatacactgaatgaaatatgtctgcttttccttgattagacaattggaaatggtaatataattatgttcatggtgggaaatttacaatagttttttggagtgaaatcaacaatgaagtgattaaagtcctaggttttcccagaccaagggtcttcccaggacacaagacttttaatggtaaaatcaggactatattggttaaaccaaaacagttggtcaccgacacaaagacatttccaggtaagttatttttttttgacaaataaagggtgaattcttgtttattatatgtttgatattcttccatcccccaaattttgtgggcagtattataccattagttgtttatcgatattgtaataattagtatcattcgtcacgcatattattcatcccataattcatgtttctttctactttaagtttcactcatttaaatatctctcacatttatatttttaa

SEQ ID NO: 17 - DNA, 6154 bp, Artificial Sequence
  Construct
aaataacgtaactgtttgatctaatctttatatgtttgtttatataagaaagatgattgagaattgacttaacgtggatgctcagtaatatgcttaatgtttaattttttcccctttttcttctgtgactttttttcataaagaaaatgatagtatcgatttaacatagcaacggcatttctttctgtcctagcaccatcaaatagcttgggtattactgctctgggttacttttggccaagccccatggctttgtttggactttatcatgataacaatgacaatgtcaccgtctttatctctaccattggtgacaataaccataccaccatgctgctttatgaggcaataacttggttttctcatttatccactcaggaactggattattacctcataaaacagtgtgattgtacaataatcaattaaatcctggcttgtcgagactcttcagaaaaaaaaaaaaaaacccttttcctaatggtggttggcaataattccctctgtctgaattcatggaactttgactgccaaggttatattttcacactgattacctattatctttctttctttctttctttcttttttgccttgaagcgttacataacttacggtaaatggcccgcctggctgaccgcccaacgacccccgcccattgacgtcaataatgacgtatgttcccatagtaacgccaatagggactttccattgacgtcaatgggtggagtatttacggtaaactgcccacttggcagtacatcaagtgtatcatatgccaagtacgccccctattgacgtcaatgacggtaaatggcccgcctggcattatgcccagtacatgaccttatgggactttcctacttggcagtacatctacgtattagtcatcgctattaccatggtgatgcggttttggcagtacatcaatgggcgtggatagcggtttgactcacggggatttccaagtctccaccccattgacgtcaatgggagtttgttttggcaccaaaatcaacgggactttccaaaatgtcgtaacaactccgccccattgacgcaaatgggcggtaggcgtgtacggtgggaggtctatataagcagagctctctggctaactagagaacccactgcttactggcttatcgaaatgccaccatgaattgcccagttctttcattgggctctggcttcttgtttcaggtcattgaaatgttgatctttgcctattttgcttcaatatccttgactgagtcacgaggtcttttcccaaggctggagaacgtgggagctttcaagaaagtttccatcgtgccaacccaagcagtatgtggactcccagaccgaagcactttttgtcacagctctgctgctgctgaaagtattcagttctgtacccagcggttttgtattcaggattgcccatacagatcttcacaccctacctacactgcccttttctcagcaggcctcagtagctgcatcacaccagacaagaatgatctgcatcctaacgcccatagcaattctgcaagttttatttttggaaatcacaagagctgcttttcttctcctccttctccaaagctgatggcatcatttaccttagctgtatggctgaaacctgagcaacaaggtgtaatgtgtgttatagaaaagacagtagatgggcagattgtgttcaaacttacaatatctgagaaagagaccatgttttattatcgcacagtaaatggtttgcaacctccaataaaagtaatgacactggggagaattcttgtgaagaaatggattcatcttagtgtgcaggtgcatcagacaaaaatcagcttctttatcaatggcgtggagaaggatcatacacctttcaatgcaagaactctaagtggttcaattacagattttgcatctggtactgtgcaaataggacagagtttaaatggtttagagcagtttgtcggaagaatgcaagattttcgattataccaagtggcacttacaaacagagagattctggaagtcttctctggagatcttctcagattgcatgcccaatcacattgccgttgccctggcagccacccgcgggtccaccctttggcacagcggtactgcattcctaatgatgcaggagacacagctgataatagagtgtcacggttgaatcctgaagcccatcctctctcttttgtcaatgataatgatgttggtacttcatgggtttcaaatgtgtttacaaacattacacagcttaatcaaggagtgactatttcagttgatttggaaaatggacagtatcaggtgttttatattatcattcagttctttagtccacaaccaacggaaataaggattcaaaggaagaaggaaaatagtttagattgggaggactggcaatattttgccaggaattgtggtgcttttggaatgaaaaacaatggagatttggaaaaacctgattctgtcaactgtcttcagctttccaattttactccatattcccgtggcaatgtcacatttagcatcctgacacctggaccaaattatcgtcctggatacaataacttctataataccccatctcttcaagagttcgtaaaagccacgcaaataaggtttcattttcatgggcagtactatacaactgagactgctgttaacctcagacacagatattatgcagtggacgaaatcaccattagtgggagatgtcagtgccatggtcatgccgataactgcgacacaacaagccagccatatagatgcctctgctcccaggagagcttcactgaaggacttcattgtgatcgctgcttgcctctttataatgacaagcctttccgccaaggtgatcaagtttacgctttcaattgtaaaccttgtcaatgcaacagccattccaaaagctgccattacaacatctctgtagacccatttccttttgagcacttcagagggggaggaggagtttgtgatgattgtgagcataacactacaggaaggaactgtgagctgtgcaaggattactttttccgacaagttggtgcagatccttcggccatagatgtttgcaaaccctgtgactgtgatacagttggcactagaaatggtagcattctttgtgatcagattggaggacagtgtaattgtaagagacacgtgtctggcaggcagtgcaatcagtgccagaatggattctacaatctacaagagttggatcctgatggctgcagtccctgtaactgcaatacctctgggacagtggatggagatattacctgtcaccaaaattcaggccagtgcaagtgcaaagcaaacgttattgggcttaggtgtgatcattgcaattttggatttaaatttctccgaagctttaatgatgttggatgtgagccctgccagtgtaacctccatggctcagtgaacaaattctgcaatcctcactctgggcagtgtgagtgcaaaaaagaagccaaaggacttcagtgtgacacctgcagagaaaacttttatgggttagatgtcaccaattgtaaggcctgtgactgtgacacagctggatccctccctgggactgtctgtaatgctaagacagggcagtgcatctgcaagcccaatgttgaagggagacagtgcaataaatgtttggagggaaacttctacctacggcaaaataattctttcctctgtctgccttgcaactgtgataagactgggacaataaatggctctctgctgtgtaacaaatcaacaggacaatgtccttgcaaattaggggtaacaggtcttcgctgtaatcagtgtgagcctcacaggtacaatttgaccattgacaattttcaacactgccagatgtgtgagtgtgattccttggggacattacctgggaccatttgtgacccaatcagtggccagtgcctgtgtgtgcctaatcgtcaaggaagaaggtgtaatcagtgtcaaccaggtttttatatttctccaggcaatgccactggctgcctgccatgctcatgccatacaactggtgcagttaatcacatctgtaatagcctgactggtcagtgtgtttgccaagatgcttccattgctgggcaacgttgtgaccaatgcaaagaccattactttggatttgatcctcagactggaagatgtcagccttgtaattgtcatctctcaggagccttgaatgaaacctgtcacttggtcacaggccagtgtttctgtaaacaatttgtcactggctcaaagtgtgatgcttgtgttcccagtgcaagccacttggatgtcaacaatctattgggttgcagcaaaactccattccagcaacctccgcccagaggacaagttcaaagttcttctgctatcaatctctcctggagtccacctgattctccaaatgcccactggcttacttacagtttactcagggatggttttgaaatctacacaacagaggatcaatacccatacagtattcaatacttcttagacacagacctgttaccatataccaaatattcctattacattgagaccaccaatgtgcatggttcaacaaggagtgtagctgtcacttacaagacaaaaccaggggtcccagagggaaacttgactttaagttatatcattcctattggctcagactctgtgacacttacctggacaacactctcaaatcaatctggtcccatagagaaatatattttgtcctgtgcccctttggctggtggtcagccatgtgtttcctacgaaggtcatgaaacctcagctaccatctggaatctggttccatttgccaagtacgatttttctgtacaggcgtgtactagcgggggctgtttacacagcttgcccattacagtgaccacagcccaggcccctccccaaagactaagtccacctaagatgcagaaaatcagttctacagaacttcatgtagaatggtctccaccagcggaactaaatggaataattataagatatgaactatacatgagaagactgagatctactaaagaaaccacatctgaggaaagtcgagtttttcagagcagtggttggctcagtcctcattcatttgtagaatcggccaatgaaaatgcattaaaacctcctcaaacaatgacaaccatcactggcttggagccatacaccaagtatgagttcagagtcttagctgtgaatatggctggaagtgtgtcttctgcctgggtctcagaaagaacgggagaatcagcacctgtattcatgatccctccttcagtctttcccctctcttcgtactctctcaatatctcctgggagaagccagcagataatgttacaagaggaaaagttgtggggtatgacatcaatatgctttctgaacaatcacctcaacagtctattcccatggcgttttcacagctgttgcacactgctaaatcccaagaactatcttacactgtagaaggactgaaaccttatcgtatatatgagtttactattactctctgcaattcagttggttgtgtgaccagtgcttcgggagcaggacaaactttagcagcaggtaagcaagttttaatggatatgaaaaatctgttgcctatcaagaaaaaaaacttataatattcaacaccttctctacttgagactttatatttgtcttctcctccctcactaactctgattgcttcttacctcaacagttttaaacaacaacaaccaaaacgtaacttaaagaggtacctaggagctacgagttacagctgtgtcataataagaaatataattagtggtagagtgactccactctacaactagaaatatatagaatatacaactagaaacatatacaaatatatagaactagaaatacatagaaatgtaattagttgtagcgtgactccagggcttaactaccaacctgtgtcctagcagtgtcctgacaattgtgagaaacaatcaggaagcttcttatgaggacgttaggatacttcttccctcagtccagacattttttgtaggcttggctctactcactcctgatccatgggaacatctagaaattactgtgtggcctggtgttatatttggctttcatgaaataggtaaatgtttatctattgttttattaagaagaagctcttaagttaataaaatttaaata

SEQ ID NO: 18 - DNA, 23 bp, Artificial Sequence
  gRNA target
ggtcccaggtaatgtccccaagg

SEQ ID NO: 19 - DNA, 23 bp, Artificial Sequence
  gRNA target
ctggcctgtgaccaagtgacagg

SEQ ID NO: 20 - DNA, 23 bp, Artificial Sequence
  gRNA target
tagaaggactgaaaccttatagg

SEQ ID NO: 21 - protein, 639 aa, Scytonema hoffmanni
MSQITIQARLISFESNRQQLWKLMADLNTPLINELLCQLGQHPDFEKWQQKGKLPSTVVSQLCQPLKTDPRFAGQPSRLYMSAIHIVDYIYKSWLAIQKRLQQQLDGKTRWLEMLNSDAELVELSGDTLEAIRVKAAEILAIAMPASESDSASPKGKKGKKEKKPSSSSPKRSLSKTLFDAYQETEDIKSRSAISYLLKNGCKLTDKEEDSEKFAKRRRQVEIQIQRLTEKLISRMPKGRDLTNAKWLETLLTATTTVAEDNAQAKRWQDILLTRSSSLPFPLVFETNEDMVWSKNQKGRLCVHFNGLSDLIFEVYCGNRQLHWFQRFLEDQQTKRKSKNQHSSGLFTLRNGHLVWLEGEGKGEPWNLHHLTLYCCVDNRLWTEEGTEIVRQEKADEITKFITNMKKKSDLSDTQQALIQRKQSTLTRINNSFERPSQPLYQGQSHILVGVSLGLEKPATVAVVDAIANKVLAYRSIKQLLGDNYELLNRQRRQQQYLSHERHKAQKNFSPNQFGASELGQHIDRLLAKAIVALARTYKAGSIVLPKLGDMREVVQSEIQAIAEQKFPGYIEGQQKYAKQYRVNVHRWSYGRLIQSIQSKAAQTGIVIEEGKQPIRGSPHDKAKELALSAYNLRLTRRS

SEQ ID NO: 22 - protein, 642 aa, Anabaena cylindrica
MSVITIQCRLVAEEDSLRQLWELMSEKNTPFINEILLQIGKHPEFETWLEKGRIPAELLKTLGNSLKTQEPFTGQPGRFYTSAITLVDYLYKSWFALQKRRKQQIEGKQRWLKMLKSDQELEQESQSSLEVIRNKATELFSKFTPQSDSEALRRNQNDKQKKVKKTKKSTKPKTSSIFKIFLSTYEEAEEPLTRCALAYLLKNNCQISELDENPEEFTRNKRRKEIEIERLKDQLQSRIPKGRDLTGEEWLETLEIATFNVPQNENEAKAWQAALLRKTANVPFPVAYESNEDMTWLKNDKNRLFVRFNGLGKLTFEIYCDKRHLHYFQRFLEDQEILRNSKRQHSSSLFTLRSGRIAWLPGEEKGEHWKVNQLNFYCSLDTRMLTTEGTQQVVEEKVTAITEILNKTKQKDDLNDKQQAFITRQQSTLARINNPFPRPSKPNYQGKSSILIGVSFGLEKPVTVAVVDVVKNKVIAYRSVKQLLGENYNLLNRQRQQQQRLSHERHKAQKQNAPNSFGESELGQYVDRLLADAIIAIAKKYQAGSIVLPKLRDMREQISSEIQSRAENQCPGYKEGQQKYAKEYRINVHRWSYGRLIESIKSQAAQAGIAIETGKQSIRGSPQEKARDLAVFTYQERQAALI

SEQ ID NO: 23 - DNA, 208 bp, Artificial Sequence
  Transposon left end
tacagtgacaaattatctgtcgtcggtgacagattaatgtcattgtgactatttaattgtcgtcgtgacccatcagcgttgcttaattaattgatgacaaattaaatgtcatcaatataatatgctctgcaattattatacaaagcaattaaaacaagcggataaaaggacttgctttcaacccacccctaagtttaatagttactga

SEQ ID NO: 24 - DNA, 219 bp, Artificial Sequence
  Transposon right end
cgacagtcaatttgtcattatgaaaatacacaaaagctttttcctatcttgcaaagcgacagctaatttgtcacaatcacggacaacgacatctattttgtcactgcaaagaggttatgctaaaactgccaaagcgctataatctatactgtataaggattttactgatgacaataatttgtcacaacgacatataattagtcactgtacacgtagaga

SEQ ID NO: 25 - DNA, 25 bp, Artificial Sequence
  Primer
ccagctaattaatgtatccatcacc

SEQ ID NO: 26 - DNA, 23 bp, Artificial Sequence
  Primer
agatgtactgccaagtaggaaag

SEQ ID NO: 27 - DNA, 22 bp, Artificial Sequence
  Primer
gcaaaccctgtgactgtgatac

SEQ ID NO: 28 - DNA, 21 bp, Artificial Sequence
  Primer
gacatagggtggccatatacc

SEQ ID NO: 29 - DNA, 23 bp, Artificial Sequence
  Primer
gaataatgctgtattctccaacc

SEQ ID NO: 30 - DNA, 21 bp, Artificial Sequence
  Primer
gttgtgaccaatgcaaagacc

SEQ ID NO: 31 - DNA, 20 bp, Artificial Sequence
  Primer
cccagcaggcatttcttagg

SEQ ID NO: 32 - DNA, 25 bp, Artificial Sequence
  Primer
gtattctacattccaatctcactgc

SEQ ID NO: 33 - DNA, 20 bp, Artificial Sequence
  Primer
ccaccagcggaactaaatgg

SEQ ID NO: 34 - DNA, 23 bp, Artificial Sequence
  Primer
tgtcttaacctccttacacatgg

SEQ ID NO: 35 - DNA, 22 bp, Artificial Sequence
  Primer
cctgactgtacctccaactttc

SEQ ID NO: 36 - DNA, 23 bp, Artificial Sequence
  Primer
agaattcactgcccagacctgat

SEQ ID NO: 37 - DNA, 21 bp, Artificial Sequence
  Primer
agtgttacgtttccgatggtg

SEQ ID NO: 38 - DNA, 23 bp, Artificial Sequence
  Primer
ccatgatagggagtcatcgaaag

SEQ ID NO: 39 - DNA, 22 bp, Artificial Sequence
  Primer
gttgcatcaaaggtgcaatctc

SEQ ID NO: 40 - DNA, 20 bp, Artificial Sequence
  Primer
atgtggattagctgcagagg

SEQ ID NO: 41 - DNA, 22 bp, Artificial Sequence
  Primer
gccaagctcagagtgagtttac

SEQ ID NO: 42 - DNA, 20 bp, Artificial Sequence
  Primer
tccagggtcagtgtgtagag

SEQ ID NO: 43 - DNA, 22 bp, Artificial Sequence
  Primer
accagtaagccatagtgtatgc

SEQ ID NO: 44 - DNA, 22 bp, Artificial Sequence
  Primer
gcattctagttgtggtttgtcc

SEQ ID NO: 45 - DNA, 23 bp, Artificial Sequence
  gRNA target site
gcctgaggaagtcacgagacctg

SEQ ID NO: 46 - DNA, 23 bp, Artificial Sequence
  gRNA target site
tgcatcagcagcctccattgccc

SEQ ID NO: 47 - DNA, 23 bp, Artificial Sequence
  gRNA target site
cagccactttggaagacagtttg

SEQ ID NO: 48 - protein, 5202 aa, Homo sapiens
MNCPVLSLGSGFLFQVIEMLIFAYFASISLTESRGLFPRLENVGAFKKVSIVPTQAVCGLPDRSTFCHSSAAAESIQFCTQRFCIQDCPYRSSHPTYTALFSAGLSSCITPDKNDLHPNAHSNSASFIFGNHKSCFSSPPSPKLMASFTLAVWLKPEQQGVMCVIEKTVDGQIVFKLTISEKETMFYYRTVNGLQPPIKVMTLGRILVKKWIHLSVQVHQTKISFFINGVEKDHTPFNARTLSGSITDFASGTVQIGQSLNGLEQFVGRMQDFRLYQVALTNREILEVFSGDLLRLHAQSHCRCPGSHPRVHPLAQRYCIPNDAGDTADNRVSRLNPEAHPLSFVNDNDVGTSWVSNVFTNITQLNQGVTISVDLENGQYQVFYIIIQFFSPQPTEIRIQRKKENSLDWEDWQYFARNCGAFGMKNNGDLEKPDSVNCLQLSNFTPYSRGNVTFSILTPGPNYRPGYNNFYNTPSLQEFVKATQIRFHFHGQYYTTETAVNLRHRYYAVDEITISGRCQCHGHADNCDTTSQPYRCLCSQESFTEGLHCDRCLPLYNDKPFRQGDQVYAFNCKPCQCNSHSKSCHYNISVDPFPFEHFRGGGGVCDDCEHNTTGRNCELCKDYFFRQVGADPSAIDVCKPCDCDTVGTRNGSILCDQIGGQCNCKRHVSGRQCNQCQNGFYNLQELDPDGCSPCNCNTSGTVDGDITCHQNSGQCKCKANVIGLRCDHCNFGFKFLRSFNDVGCEPCQCNLHGSVNKFCNPHSGQCECKKEAKGLQCDTCRENFYGLDVTNCKACDCDTAGSLPGTVCNAKTGQCICKPNVEGRQCNKCLEGNFYLRQNNSFLCLPCNCDKTGTINGSLLCNKSTGQCPCKLGVTGLRCNQCEPHRYNLTIDNFQHCQMCECDSLGTLPGTICDPISGQCLCVPNRQGRRCNQCQPGFYISPGNATGCLPCSCHTTGAVNHICNSLTGQCVCQDASIAGQRCDQCKDHYFGFDPQTGRCQPCNCHLSGALNETCHLVTGQCFCKQFVTGSKCDACVPSASHLDVNNLLGCSKTPFQQPPPRGQVQSSSAINLSWSPPDSPNAHWLTYSLLRDGFEIYTTEDQYPYSIQYFLDTDLLPYTKYSYYIETTNVHGSTRSVAVTYKTKPGVPEGNLTLSYIIPIGSDSVTLTWTTLSNQSGPIEKYILSCAPLAGGQPCVSYEGHETSATIWNLVPFAKYDFSVQACTSGGCLHSLPITVTTAQAPPQRLSPPKMQKISSTELHVEWSPPAELNGIIIRYELYMRRLRSTKETTSEESRVFQSSGWLSPHSFVESANENALKPPQTMTTITGLEPYTKYEFRVLAVNMAGSVSSAWVSERTGESAPVFMIPPSVFPLSSYSLNISWEKPADNVTRGKVVGYDINMLSEQSPQQSIPMAFSQLLHTAKSQELSYTVEGLKPYRIYEFTITLCNSVGCVTSASGAGQTLAAAPAQLRPPLVKGINSTTIHLRWFPPEELNGPSPIYQLERRESSLPALMTTMMKGIRFIGNGYCKFPSSTHPVNTDFTGIKASFRTKVPEGLIVFAASPGNQEEYFALQLKKGRLYFLFDPQGSPVEVTTTNDHGKQYSDGKWHEIIAIRHQAFGQITLDGIYTGSSAILNGSTVIGDNTGVFLGGLPRSYTILRKDPEIIQKGFVGCLKDVHFMKNYNPSAIWEPLDWQSSEEQINVYNSWEGCPASLNEGAQFLGAGFLELHPYMFHGGMNFEISFKFRTDQLNGLLLFVYNKDGPDFLAMELKSGILTFRLNTSLAFTQVDLLLGLSYCNGKWNKVIIKKEGSFISASVNGLMKHASESGDQPLVVNSPVYVGGIPQELLNSYQHLCLEQGFGGCMKDVKFTRGAVVNLASVSSGAVRVNLDGCLSTDSAVNCRGNDSILVYQGKEQSVYEGGLQPFTEYLYRVIASHEGGSVYSDWSRGRTTGAAPQSVPTPSRVRSLNGYSIEVTWDEPVVRGVIEKYILKAYSEDSTRPPRMPSASAEFVNTSNLTGILTGLLPFKNYAVTLTACTLAGCTESSHALNISTPQEAPQEVQPPVAKSLPSSLLLSWNPPKKANGIITQYCLYMDGRLIYSGSEENYIVTDLAVFTPHQFLLSACTHVGCTNSSWVLLYTAQLPPEHVDSPVLTVLDSRTIHIQWKQPRKISGILERYVLYMSNHTHDFTIWSVIYNSTELFQDHMLQYVLPGNKYLIKLGACTGGGCTVSEASEALTDEDIPEGVPAPKAHSYSPDSFNVSWTEPEYPNGVITSYGLYLDGILIHNSSELSYRAYGFAPWSLHSFRVQACTAKGCALGPLVENRTLEAPPEGTVNVFVKTQGSRKAHVRWEAPFRPNGLLTHSVLFTGIFYVDPVGNNYTLLNVTKVMYSGEETNLWVLIDGLVPFTNYTVQVNISNSQGSLITDPITIAMPPGAPDGVLPPRLSSATPTSLQVVWSTPARNNAPGSPRYQLQMRSGDSTHGFLELFSNPSASLSYEVSDLQPYTEYMFRLVASNGFGSAHSSWIPFMTAEDKPGPVVPPILLDVKSRMMLVTWQHPRKSNGVITHYNIYLHGRLYLRTPGNVTNCTVMHLHPYTAYKFQVEACTSKGCSLSPESQTVWTLPGAPEGIPSPELFSDTPTSVIISWQPPTHPNGLVENFTIERRVKGKEEVTTLVTLPRSHSMRFIDKTSALSPWTKYEYRVLMSTLHGGTNSSAWVEVTTRPSRPAGVQPPVVTVLEPDAVQVTWKPPLIQNGDILSYEIHMPDPHITLTNVTSAVLSQKVTHLIPFTNYSVTIVACSGGNGYLGGCTESLPTYVTTHPTVPQNVGPLSVIPLSESYVVISWQPPSKPNGPNLRYELLRRKIQQPLASNPPEDLNRWHNIYSGTQWLYEDKGLSRFTTYEYMLFVHNSVGFTPSREVTVTTLAGLPERGANLTASVLNHTAIDVRWAKPTVQDLQGEVEYYTLFWSSATSNDSLKILPDVNSHVIGHLKPNTEYWIFISVFNGVHSINSAGLHATTCDGEPQGMLPPEVVIINSTAVRVIWTSPSNPNGVVTEYSIYVNNKLYKTGMNVPGSFILRDLSPFTIYDIQVEVCTIYACVKSNGTQITTVEDTPSDIPTPTIRGITSRSLQIDWVSPRKPNGIILGYDLLWKTWYPCAKTQKLVQDQSDELCKAVRCQKPESICGHICYSSEAKVCCNGVLYNPKPGHRCCEEKYIPFVLNSTGVCCGGRIQEAQPNHQCCSGYYARILPGEVCCPDEQHNRVSVGIGDSCCGRMPYSTSGNQICCAGRLHDGHGQKCCGRQIVSNDLECCGGEEGVVYNRLPGMFCCGQDYVNMSDTICCSASSGESKAHIKKNDPVPVKCCETELIPKSQKCCNGVGYNPLKYVCSDKISTGMMMKETKECRILCPASMEATEHCGRCDFNFTSHICTVIRGSHNSTGKASIEEMCSSAEETIHTGSVNTYSYTDVNLKPYMTYEYRISAWNSYGRGLSKAVRARTKEDVPQGVSPPTWTKIDNLEDTIVLNWRKPIQSNGPIIYYILLRNGIERFRGTSLSFSDKEGIQPFQEYSYQLKACTVAGCATSSKVVAATTQGVPESILPPSITALSAVALHLSWSVPEKSNGVIKEYQIRQVGKGLIHTDTTDRRQHTVTGLQPYTNYSFTLTACTSAGCTSSEPFLGQTLQAAPEGVWVTPRHIIINSTTVELYWSLPEKPNGLVSQYQLSRNGNLLFLGGSEEQNFTDKNLEPNSRYTYKLEVKTGGGSSASDDYIVQTPMSTPEEIYPPYNITVIGPYSIFVAWIPPGILIPEIPVEYNVLLNDGSVTPLAFSVGHHQSTLLENLTPFTQYEIRIQACQNGSCGVSSRMFVKTPEAAPMDLNSPVLKALGSACIEIKWMPPEKPNGIIINYFIYRRPAGIEEESVLFVWSEGALEFMDEGDTLRPFTLYEYRVRACNSKGSVESLWSLTQTLEAPPQDFPAPWAQATSAHSVLLNWTKPESPNGIISHYRVVYQERPDDPTFNSPTVHAFTVKGTSHQAHLYGLEPFTTYRIGVVAANHAGEILSPWTLIQTLESSPSGLRNFIVEQKENGRALLLQWSEPMRTNGVIKTYNIFSDGFLEYSGLNRQFLFRRLDPFTLYTLTLEACTRAGCAHSAPQPLWTDEAPPDSQLAPTVHSVKSTSVELSWSEPVNPNGKIIRYEVIRRCFEGKAWGNQTIQADEKIVFTEYNTERNTFMYNDTGLQPWTQCEYKIYTWNSAGHTCSSWNVVRTLQAPPEGLSPPVISYVSMNPQKLLISWIPPEQSNGIIQSYRLQRNEMLYPFSFDPVTFNYTDEELLPFSTYSYALQACTSGGCSTSKPTSITTLEAAPSEVSPPDLWAVSATQMNVCWSPPTVQNGKITKYLVRYDNKESLAGQGLCLLVSHLQPYSQYNFSLVACTNGGCTASVSKSAWTMEALPENMDSPTLQVTGSESIEITWKPPRNPNGQIRSYELRRDGTIVYTGLETRYRDFTLTPGVEYSYTVTASNSQGGILSPLVKDRTSPSAPSGMEPPKLQARGPQEILVNWDPPVRTNGDIINYTLFIRELFERETKIIHINTTHNSFGMQSYIVNQLKPFHRYEIRIQACTTLGCASSDWTFIQTPEIAPLMQPPPHLEVQMAPGGFQPTVSLLWTGPLQPNGKVLYYELYRRQIATQPRKSNPVLIYNGSSTSFIDSELLPFTEYEYQVWAVNSAGKAPSSWTWCRTGPAPPEGLRAPTFHVISSTQAVVNISAPGKPNGIVSLYRLFSSSAHGAETVLSEGMATQQTLHGLQAFTNYSIGVEACTCFNCCSKGPTAELRTHPAPPSGLSSPQIGTLASRTASFRWSPPMFPNGVIHSYELQFHVACPPDSALPCTPSQIETKYTGLGQKASLGGLQPYTTYKLRVVAHNEVGSTASEWISFTTQKELPQYRAPFSVDSNLSVVCVNWSDTFLLNGQLKEYVLTDGGRRVYSGLDTTLYIPRTADKTFFFQVICTTDEGSVKTPLIQYDTSTGLGLVLTTPGKKKGSRSKSTEFYSELWFIVLMAMLGLILLAIFLSLILQRKIHKEPYIRERPPLVPLQKRMSPLNVYPPGENHMGLADTKIPRSGTPVSIRSNRSACVLRIPSQNQTSLTYSQGSLHRSVSQLMDIQDKKVLMDNSLWEAIMGHNSGLYVDEEDLMNAIKDFSSVTKERTTFTDTHL

SEQ ID NO: 49 - DNA, 4700 bp, Artificial Sequence
  Construct
cattgacataaaacagagtatcacttctatatgaagttggagttcatgcttggttttttgtttttgtttttagtggattaatgttcactgaatattgcaaatgtgtgtgtcctcctttcagcacccccagctggtcagtaagaagaaatagcctgggaaagtcctaagtagcagaaggaatccagcccaaaatttaaaaactaccacggataacccagaaaatgaataatctttatgtgggaaatcaaaattgacttcacagaattgcttagaagtcagatctaccatacacacctatggatttgatcaccaataaactggtagccctgtcatggtggagatcggcatgagaggagaaccaggggaggaggagaagaaagtgggaataaaataagtcacaaagggaaaaaggtgtaattaagaaagcaaaaaggtggaagagacagaacaagtacaagaacagaaagcagtgattcaaagagcaaagaggggaggtagaaaatagaagaggaaaaggctagaactaaaaggaataaaggtagaaagaagatagctgggtgcctgcgggaaaattgaaggtgtcataaaatcaatggtggttgggaatagagaaaaaagtgctcatttacagccataggcactaaatactcacaaaaactcattttgttggaaaggagaagtccctgctatgtaaatagaccttttcaagtagcagagaccagctatgaggcaaaacataattgattagttgaatttaactggatggtgataaggtgtcttcatgattgataatctggtgtgtagttgggttaactttggccccgcaaggtctttgtatcatgtaagggaggctgttttaagctgttaggtatcaggtgaggggatttattaccactgagaccgtaattccatgatgttccttcatgacctggaaacattcctgggggatcattccatgatgttccttcatgacctggaaacattcctgagggatcatttagctctagctgcaaaggtaggagtccaggactgctgagaactgcttcatactttctaaggtctgcattcttcattgctatgttaagtaattctgaagagtaccagaattttcatgccggaaagaatcttgagagttatttattccatacatccttgtttaggggaagaattgcactcacccctttcgaacagatcaggaactttagtttagaaagccagggggattttgattgttcaaaaatttccatggaaatataatttttttttgagacagagtcttgctctgtcacccaggcgggagtgcagtggcgcaatctcggctcactgcaagctctgcctcccaggttcaagccattctcaactttgttattcttaagaattagctgtgaataagaatacatgtaagcttgtcttttttttttaaggcctggtgttttaaagattcttcccatgaaaatctattttgctgaaaatcactaatttctgccttatgtcctgaaggtatgaaatacgaattcaagcgtgcaccaccctgggatgtgcatcaagtgactggacattcatacagactcctgagattgcacctttgatgcaaccccctccacatctggaggtacaaatggctccaggaggattccagccaactgtttctcttttgtggacaggaccgctgcagccaaatggaaaagttttgtattacgaattatacagaagacaaatagcaactcagcctagaaaatccaatccagtcctaatctataacggaagctcaacatcttttatagattccgaactattgcctttcacagagtatgagtatcaggtctgggcagtgaattctgcaggaaaagcccccagtagctggacatggtgcagaaccgggccagccccaccagaaggtctcagagcccccacgttccatgtgatctcttctacccaagcagtggtcaacatcagtgcccctgggaagcccaacgggatcgtcagtctctacaggctgttctccagcagcgcccatggggctgagacagtgctatccgaaggcatggccacccagcagactctccatggccttcaagccttcactaactactctattggagtagaggcctgcacctgcttcaactgttgcagcaaaggaccgacagctgaactgagaacccatcctgccccaccctcaggactgtcctctccacaaatcgggacgctggcctcaaggacggcctccttccggtggagtccccccatgttccccaatggtgtcattcacagctatgaactccaattccacgtggcttgccctcctgactcagccctcccctgtactcccagccaaatagaaacaaagtacacggggctggggcagaaagccagccttgggggtctccagccctacaccacatacaagctgagagtggtggcacacaacgaggtgggcagtacggcttccgagtggatcagtttcaccacccaaaaagaattgcctcagtaccgagccccattttcggtggacagcaatttgtctgtggtgtgtgtgaactggagtgacaccttcctcctgaacggccaactgaaggagtacgtgttaaccgacggagggcgacgcgtgtacagcggcttggacaccaccctctacataccgagaacggcggacaaaaccttctttttccaggtcatctgcacgactgacgaaggaagtgttaagacgccgttgatccaatatgatacctctactggacttggcttggtcctaacaactcctgggaaaaagaagggatcgcggagcaaaagcacagagttctacagcgagctgtggttcatagtgttaatggcgatgctgggcttgatcttgttggccatttttctgtccctgatactacaaagaaaaatccacaaagagccatatatcagagaaagacctcccttggtacctcttcagaagaggatgtctccattgaatgtttacccaccgggggaaaaccatatggggttagccgataccaaaattccccggtctgggacacctgtgagtatccgcagcaaccggagtgcatgtgtcctgcgcatcccgagtcaaaaccaaaccagcctaacctactcccagggttctcttcaccgcagcgtcagccagctcatggacattcaagacaagaaagtcttgatggacaactcactgtgggaagccatcatgggccacaacagtggactgtatgtggatgaagaggacctgatgaacgccatcaaggatttcagctcagtgactaaggaacgcaccacattcacagacacccacctgtaaaacttgtttattgcagcttataatggttacaaataaagcaatagcatcacaaatttcacaaataaagcatttttttcactgcattctagttgtggtttgtccaaactcatcaatgtatcttatcatgtctggatcgtaagaaatgtgtattataaacaattcgagctgattgtttgcacccgtcagcacctgcctgtaaaaatggtgcacaatttgaaaaggcacttaaagaaatgtaggacttaaggagaataataatattccttaaaaatttttaagtggtaaatgaggaaaaaccatgttcattgcctttttcattttcttggtttttgagccatattatatacgttgtttttcttaagtagattccaggtgaatttgcatttcttattagtaaagtggtttctgccattaagattccctctgtcagcgttgccttggtaggagacactccttatttaaagatcactttgaaaataactcattactcgtaccaaaataaaatcaaatagcaaacatctctagcctcggtgctcaagaaagatacagaatgttgaaaaaagtctagaggaatacaactcacctgcccatggcgatgagttaagttttctctgaggatggcctaaaaaaataagactgcattcttaaaaagccaagaattaagaataatattcagaaaatatggtgaattctgtggaggacttctgttaggtttgttttgttttgccatcagagtccatttgcattcttcttgtgataacaacctcatttcctgtgggagaatgtgcttcccccaccctttgctcaggcgtggtgggagtgtcaatcaatgtgtcaggctgtcttctagccaagtggtgggcacatgagccgctcagcccctcagatttgcctggggcttgatcttcagcagagtgactcagaattttaaaaggtggaggtgagaagtcgtgataaaatatccctaacctcaatctaaaagtttttcttttccctgctatttccaagcatggttcttcaaccgttcttttaattccataaactcacagtaaattctcatttgcttaagtcagaatcagtgcctcttgcttgcagtcaaagaaagcttactgactgatgtaagcacttaagtgccaggaacaatgccaacagaaattttctaaaagaggaaactgagccttaaaaagcttattataacatgaaatactaaaaataataagtcaccaaaaagatagtgaccaaatcaatgagtacagtgaatacagggaacattttaagcatgaaaagaatattttaggacaataatgtatgggacaaattaccgaattaataagatttaaaaatataaataaattctcgaatggtttggaaaaatacacagatataaatccataatcccttg

SEQ ID NO: 50 - DNA, 4700 bp, Artificial Sequence
  Construct
tcaaaaaaaatgaaaacttgctctacatttgtacagtataataagcattcagatgtttttttccagaacaaaagactactttgcccccaaaggagcaatcagttcttccatggcctggaagagaaaacagggtgtttttttccatcccctagtcataaagatttatatacatgtatatatgtacatgtatatatatgtatggatatttgtacttatgtataaaatataggtgtctgtgtgcctaaacacacacacacacaagcatactctttcagccctggcactctgtaacaacaaatgattaagcgttgtaattccatttcccagcaaatgccgtggaaggtagaccctactttagtcagtatgagatcagaagcagttcatatccataaaacaggagactttaatactattctctactttaaaaaaatacaaataggagaaaccttgtgaataccatttaagtcaaagaatctgattcaatagcccttagttttgagataaatgtttatgtagttcccaaactgaaaaaaaagaaaagaaaaaggcaaagaaaaacattgtttgtctctctgtgggccttatgttaactgaaaaaaatcacatatccccaattaatatcagaatacttcttctaaattagggtcatcaaaataaggaacaagggggtgaaggttaaaaaggggctaagtaactacacaaagaaattgtatgctgcaagttatcccttttgcttctgtccttctgtagacatacaacatcttcagtgacgggttccttgagtactctggtttgaatcgtcagtttctcttccgccgcctggatcctttcactctctacacactgaccctggaggcctgcaccagagcaggttgtgcacactcggcgcctcagcctctgtggacagatgaagcccctccagactctcagctggctcctactgtccactctgtgaagtccaccagtgttgagctgagctggtctgagcctgttaacccaaatggaaaaataattcgctatgaagtgattcgcagatgcttcgagggaaaagcttggggaaatcagacaatccaggccgacgagaaaattgttttcacagaatataacactgaaaggaatacatttatgtataatgacacaggtttgcaaccatggacgcagtgtgaatataaaatctacacttggaattcagctgggcatacctgtagctcttggaatgtggtgaggacattgcaagcacctccagaaggtctctctccacctgtgatatcctatgtttctatgaatccccaaaaactgctgatttcctggatcccaccagaacagtctaatggtattatccagtcctataggcttcaaaggaatgaaatgctctatccttttagctttgatcctgtgactttcaattacactgatgaagagcttcttcctttttccacctatagctatgcactccaagcctgcacgagtggaggatgctccaccagcaaacccaccagcatcacaactctggaggctgctccatcagaagtcagccctccagatctttgggccgtcagtgccactcaaatgaatgtatgttggtcaccgcccacagtgcaaaatggaaagattactaaatatttagttagatatgataataaagagtcccttgctggccagggcctgtgcctgctggtttcccacctgcagccttactctcagtataacttctcccttgtagcctgcacgaatggaggttgcacagctagtgtgtcaaaatctgcctggacaatggaggccctgccagagaacatggactctccaacattgcaagtcacaggctcagaatcaatagaaatcacctggaaacctccaagaaacccaaatggccagatcagaagttatgaacttaggagggatggaaccattgtatatacaggcttggaaacacgctatcgtgattttactctcaccccaggtgtggagtatagctacacagtaactgccagcaacagccaagggggtattttgagtcctcttgtcaaagatcgaaccagcccctcagcaccctcagggatggaacctccaaaattgcaggccaggggtcctcaggagatcttagtgaactgggaccctccagtgagaacaaatggtgatatcatcaattataccctcttcatccgtgaactatttgaaagagaaactaaaatcatacacataaacacaactcataattcttttggtatgcagtcatatatagtaaaccagctgaagccatttcacaggtatgaaatacgaattcaagcgtgcaccaccctgggatgtgcatcaagtgactggacattcatacagacccctgagattgcacctttgatgcaaccccctccacatctggaggtacaaatggctccaggaggattccagccaactgtttctcttttgtggacaggaccgctgcagccaaatggaaaagttttgtattacgaattatacagaagacaaatagcaactcagcctagaaaatccaatccagtcctaatctataacggaagctcaacatcttttatagattccgaactattgcctttcacagagtatgagtatcaggtctgggcagtgaattctgcaggaaaagcccccagtagctggacatggtgcagaaccgggccagccccaccagaaggtctcagagcccccacgttccatgtgatctcttctacccaagcagtggtcaacatcagtgcccctgggaagcccaacgggatcgtcagtctctacaggctgttctccagcagcgcccatggggctgagacagtgctatccgaaggcatggccacccagcagactctccatggccttcaagccttcactaactactctattggagtagaggcctgcacctgcttcaactgttgcagcaaaggaccgacagctgaactgagaacccatcctgccccaccctcaggactgtcctctccacaaatcgggacgctggcctcaaggacggcctccttccggtggagtccccccatgttccccaatggtgtcattcacagctatgaactccaattccacgtggcttgccctcctgactcagccctcccctgtactcccagccaaatagaaacaaagtacacggggctggggcagaaagccagccttgggggtctccagccctacaccacatacaagctgagagtggtggcacacaacgaggtgggcagtacggcttccgagtggatcagtttcaccacccaaaaagaattgcctcagtaccgagccccattttcggtggacagcaatttgtctgtggtgtgtgtgaactggagtgacaccttcctcctgaacggccaactgaaggagtacgtgttaaccgacggagggcgacgcgtgtacagcggcttggacaccaccctctacataccgagaacggcggacaaaaccttctttttccaggtcatctgcacgactgacgaaggaagtgttaagacgccgttgatccaatatgatacctctactggacttggcttggtcctaacaactcctgggaaaaagaagggatcgcggagcaaaagcacagagttctacagcgagctgtggttcatagtgttaatggcgatgctgggcttgatcttgttggccatttttctgtccctgatactacaaagaaaaatccacaaagagccatatatcagagaaagacctcccttggtacctcttcagaagaggatgtctccattgaatgtttacccaccgggggaaaaccatatggggttagccgataccaaaattccccggtctgggacacctgtgagtatccgcagcaaccggagtgcatgtgtcctgcgcatcccgagtcaaaaccaaaccagcctaacctactcccagggttctcttcaccgcagcgtcagccagctcatggacattcaagacaagaaagtcttgatggacaactcactgtgggaagccatcatgggccacaacagtggactgtatgtggatgaagaggacctgatgaacgccatcaaggatttcagctcagtgactaaggaacgcaccacattcacagacacccacctgtaaaacttgtttattgcagcttataatggttacaaataaagcaatagcatcacaaatttcacaaataaagcatttttttcactgcattctagttgtggtttgtccaaactcatcaatgtatcttatcatgtctggatcgtaggtagccatgtctcggttttctgagagtaagccactgctgacctttctattgcctgagcccttggtcagttctaatgaagactctaaaaatgggatgcaaggtgtccccaacctccatccacctaaacgtgcatagtagacaaagcacatcctcacccaagcaaagcctgcttgcataacctccagagagcagaattctttcaggtgatgttttgagagtcagtgtttcagaaaggtttgcaatgcatcctggtatctgaaataagtagaacagagatgaggctagtccccctggaaatacgcaggcccctggacagttctgacagccccgatagggtcatctggccagactgtgaagaaaatgatgtattattttaaggttaaaaagtgccaatcaatgagcgcaattaccagccagagttagactaaaacaaaatttgtttcgtgaagagccttcttatcaaatccagcacttcttccaggaataataaggcttc

SEQ ID NO: 51 - DNA, 5233 bp, Artificial Sequence
  Construct
ccatttatcatagaagggtaaggattcccaataatagcttctactaattccatatcctgtggttccagttgtacaaaaaataaaacctcgatataactgcatgcatacatgcacacacacacagacacatacacacagatctggaaaatatataaaaatgcattaataatgtttaatatatgcttctgtatttttaaaagattttaaatatgtttgttttcttgtattgcatatgtatcttgttattcagcaaaaacatctggaagataataaaatgtgattttggatgaggtttcaccttttgtgctttttatatttcttctgtgttttccatgttttatacaaagcatatgcactcttttataatcagtcaaatacgtgtgtgtgtgtgtgtgtgtgtgtcaactacactttaaaaatgatatggagttaggccactggagtacttctccatctggtttttctttactatgacaccaggaagaaacagctgaaaagttaagttgataacaaattctaaaaaaaatgtttttactccatctacaaactttgttttgaagtgtgcagctgtcactggttgcctgcttggtttcctttcagacgccctgctggcattgaagaggagtctgttttatttgtctggtcagaaggagcccttgaatttatggatgaaggagacaccctgaggcctttcacactctacgaatatcgggtcagagcatgcaactccaagggttcagtggagagtctgtggtcattaacacaaactctggaagctccacctcaagattttccagctccttgggctcaagccacgagtgctcattcagttctgttgaattggacaaagccagaatctcccaatggcattatctcccattaccgtgtggtctaccaggagagacccgacgatcctacatttaacagccctaccgtgcatgctttcacagtgaagggaacaagccatcaagcccacctgtacgggttagaaccattcacaacatatcgcattggtgttgtggctgcaaaccatgcaggagaaattttaagcccttggactctgattcaaaccttagaatcttccccaagtggactgagaaactttatagtagaacagaaagagaatggccgggcattgctactacagtggtcagaacctatgagaaccaatggtgtgattaagacatacaacatcttcagtgacgggttcctggagtactctggtttgaatcgtcagtttctcttccgccgcctggatcctttcactctctacacactgaccctggaggcctgcaccagagcaggttgtgcacactcggcgcctcagcctctgtggacagatgaagcccctccagactctcagctggctcctactgtccactctgtgaagtccaccagtgttgagctgagctggtctgagcctgttaacccaaatggaaaaataattcgctatgaagtgattcgcagatgcttcgagggaaaagcttggggaaatcagacaatccaggccgacgagaaaattgttttcacagaatataacactgaaaggaatacatttatgtataatgacacaggtttgcaaccatggacgcagtgtgaatataaaatctacacttggaattcagctgggcatacctgtagctcttggaatgtggtgaggacattgcaagcacctccagaaggtctctctccacctgtgatatcctatgtttctatgaatccccaaaaactgctgatttcctggatcccaccagaacagtctaatggtattatccagtcctataggcttcaaaggaatgaaatgctctatccttttagctttgatcctgtgactttcaattacactgatgaagagcttcttcctttttccacctatagctatgcactccaagcctgcacgagtggaggatgctccaccagcaaacccaccagcatcacaactctggaggctgctccatcagaagtcagccctccagatctttgggccgtcagtgccactcaaatgaatgtatgttggtcaccgcccacagtgcaaaatggaaagattactaaatatttagttagatatgataataaagagtcccttgctggccagggcctgtgcctgctggtttcccacctgcagccttactctcagtataacttctcccttgtagcctgcacgaatggaggttgcacagctagtgtgtcaaaatctgcctggacaatggaggccctgccagagaacatggactctccaacattgcaagtcacaggctcagaatcaatagaaatcacctggaaacctccaagaaacccaaatggccagatcagaagttatgaacttaggagggatggaaccattgtatatacaggcttggaaacacgctatcgtgattttactctcaccccaggtgtggagtatagctacacagtaactgccagcaacagccaagggggtattttgagtcctcttgtcaaagatcgaaccagcccctcagcaccctcagggatggaacctccaaaattgcaggccaggggtcctcaggagatcttagtgaactgggaccctccagtgagaacaaatggtgatatcatcaattataccctcttcatccgtgaactatttgaaagagaaactaaaatcatacacataaacacaactcataattcttttggtatgcagtcatatatagtaaaccagctgaagccatttcacaggtatgaaatacgaattcaagcgtgcaccaccctgggatgtgcatcaagtgactggacattcatacagacccctgagattgcacctttgatgcaaccccctccacatctggaggtacaaatggctccaggaggattccagccaactgtttctcttttgtggacaggaccgctgcagccaaatggaaaagttttgtattacgaattatacagaagacaaatagcaactcagcctagaaaatccaatccagtcctaatctataacggaagctcaacatcttttatagattccgaactattgcctttcacagagtatgagtatcaggtctgggcagtgaattctgcaggaaaagcccccagtagctggacatggtgcagaaccgggccagccccaccagaaggtctcagagcccccacgttccatgtgatctcttctacccaagcagtggtcaacatcagtgcccctgggaagcccaacgggatcgtcagtctctacaggctgttctccagcagcgcccatggggctgagacagtgctatccgaaggcatggccacccagcagactctccatggccttcaagccttcactaactactctattggagtagaggcctgcacctgcttcaactgttgcagcaaaggaccgacagctgaactgagaacccatcctgccccaccctcaggactgtcctctccacaaatcgggacgctggcctcaaggacggcctccttccggtggagtccccccatgttccccaatggtgtcattcacagctatgaactccaattccacgtggcttgccctcctgactcagccctcccctgtactcccagccaaatagaaacaaagtacacggggctggggcagaaagccagccttgggggtctccagccctacaccacatacaagctgagagtggtggcacacaacgaggtgggcagtacggcttccgagtggatcagtttcaccacccaaaaagaattgcctcagtaccgagccccattttcggtggacagcaatttgtctgtggtgtgtgtgaactggagtgacaccttcctcctgaacggccaactgaaggagtacgtgttaaccgacggagggcgacgcgtgtacagcggcttggacaccaccctctacataccgagaacggcggacaaaaccttctttttccaggtcatctgcacgactgacgaaggaagtgttaagacgccgttgatccaatatgatacctctactggacttggcttggtcctaacaactcctgggaaaaagaagggatcgcggagcaaaagcacagagttctacagcgagctgtggttcatagtgttaatggcgatgctgggcttgatcttgttggccatttttctgtccctgatactacaaagaaaaatccacaaagagccatatatcagagaaagacctcccttggtacctcttcagaagaggatgtctccattgaatgtttacccaccgggggaaaaccatatggggttagccgataccaaaattccccggtctgggacacctgtgagtatccgcagcaaccggagtgcatgtgtcctgcgcatcccgagtcaaaaccaaaccagcctaacctactcccagggttctcttcaccgcagcgtcagccagctcatggacattcaagacaagaaagtcttgatggacaactcactgtgggaagccatcatgggccacaacagtggactgtatgtggatgaagaggacctgatgaacgccatcaaggatttcagctcagtgactaaggaacgcaccacattcacagacacccacctgtaaaacttgtttattgcagcttataatggttacaaataaagcaatagcatcacaaatttcacaaataaagcatttttttcactgcattctagttgtggtttgtccaaactcatcaatgtatcttatcatgtctggatcgtaagaccctttagaaaagtaacagacatgcagattatctggtgaatacgttgaaattaattttcttgtccaacttctcatttttcttcacttagggcttaaatatatgaaaatctttcacttgtgaaaagttgcaatgtagtcacggggataagatactgaactgagtatgaggagtattggagaccagtttgtagaccacgactaattttgattacctcaaaaccaataaataaattttatttattcataaaattgcctgatttccattttccatatttactaagtgggaatattttttttttgagacaggctctcattctgtcacccaaactggagtggagtggcatggtctcagctcaccacagcttctgcctcctaggtttaagcaattctcctgcctcagcctcctgagtagctgggattacaggtgcccaccactgcccaactaatttttgtatttttaatagagaggggttttcaccatgttggccaggctagtctcgaactcctgacctcaagtgatctgcctgcctcagcctcccaaagttctgggattacaggcgtaagccactgcgcctggcctaaatggaaataatt

SEQ ID NO: 52 - DNA, 23 bp, Artificial Sequence
  gRNA target
gcatcaaaggtgcaatctcaggg

SEQ ID NO: 53 - DNA, 23 bp, Artificial Sequence
  gRNA target
cactgaacccttggagttacagg

SEQ ID NO: 54 - DNA, 23 bp, Artificial Sequence
  gRNA target
catcttcagtgacgggttcctgg

SEQ ID NO: 55 - protein, 161 aa, Homo sapiens
MNCPVLSLGSGFLFQVIEMLIFAYFASISLTESRGLFPRLENVGAFKKVSIVPTQAVCGLPDRSTFCHSSAAAESIQFCTQRFCIQDCPYRSSHPTYTALFSAGLSSCITPDKNDLHPNAHSNSASFIFGNHKSCFSSPPSPKLMASFTLAVWLKPEQQGV

SEQ ID NO: 56 - protein, 29 aa, Homo sapiens
YVDEEDLMNAIKDFSSVTKERTTFTDTHL

SEQ ID NO: 57 - protein, 1542 aa, Homo sapiens
MNCPVLSLGSGFLFQVIEMLIFAYFASISLTESRGLFPRLENVGAFKKVSIVPTQAVCGLPDRSTFCHSSAAAESIQFCTQRFCIQDCPYRSSHPTYTALFSAGLSSCITPDKNDLHPNAHSNSASFIFGNHKSCFSSPPSPKLMASFTLAVWLKPEQQGVMCVIEKTVDGQIVFKLTISEKETMFYYRTVNGLQPPIKVMTLGRILVKKWIHLSVQVHQTKISFFINGVEKDHTPFNARTLSGSITDFASGTVQIGQSLNGLEQFVGRMQDFRLYQVALTNREILEVFSGDLLRLHAQSHCRCPGSHPRVHPLAQRYCIPNDAGDTADNRVSRLNPEAHPLSFVNDNDVGTSWVSNVFTNITQLNQGVTISVDLENGQYQVFYIIIQFFSPQPTEIRIQRKKENSLDWEDWQYFARNCGAFGMKNNGDLEKPDSVNCLQLSNFTPYSRGNVTFSILTPGPNYRPGYNNFYNTPSLQEFVKATQIRFHFHGQYYTTETAVNLRHRYYAVDEITISGRCQCHGHADNCDTTSQPYRCLCSQESFTEGLHCDRCLPLYNDKPFRQGDQVYAFNCKPCQCNSHSKSCHYNISVDPFPFEHFRGGGGVCDDCEHNTTGRNCELCKDYFFRQVGADPSAIDVCKPCDCDTVGTRNGSILCDQIGGQCNCKRHVSGRQCNQCQNGFYNLQELDPDGCSPCNCNTSGTVDGDITCHQNSGQCKCKANVIGLRCDHCNFGFKFLRSFNDVGCEPCQCNLHGSVNKFCNPHSGQCECKKEAKGLQCDTCRENFYGLDVTNCKACDCDTAGSLPGTVCNAKTGQCICKPNVEGRQCNKCLEGNFYLRQNNSFLCLPCNCDKTGTINGSLLCNKSTGQCPCKLGVTGLRCNQCEPHRYNLTIDNFQHCQMCECDSLGTLPGTICDPISGQCLCVPNRQGRRCNQCQPGFYISPGNATGCLPCSCHTTGAVNHICNSLTGQCVCQDASIAGQRCDQCKDHYFGFDPQTGRCQPCNCHLSGALNETCHLVTGQCFCKQFVTGSKCDACVPSASHLDVNNLLGCSKTPFQQPPPRGQVQSSSAINLSWSPPDSPNAHWLTYSLLRDGFEIYTTEDQYPYSIQYFLDTDLLPYTKYSYYIETTNVHGSTRSVAVTYKTKPGVPEGNLTLSYIIPIGSDSVTLTWTTLSNQSGPIEKYILSCAPLAGGQPCVSYEGHETSATIWNLVPFAKYDFSVQACTSGGCLHSLPITVTTAQAPPQRLSPPKMQKISSTELHVEWSPPAELNGIIIRYELYMRRLRSTKETTSEESRVFQSSGWLSPHSFVESANENALKPPQTMTTITGLEPYTKYEFRVLAVNMAGSVSSAWVSERTGESAPVFMIPPSVFPLSSYSLNISWEKPADNVTRGKVVGYDINMLSEQSPQQSIPMAFSQLLHTAKSQELSYTVEGLKPYRIYEFTITLCNSVGCVTSASGAGQTLAAAPAQLRPPLVKGINSTTIHLRWFPPEELNGPSPIYQLERRESSLPALMTTMMKGIRFIGNGYCKFPSSTHPVNTDFT

SEQ ID NO: 58 - protein, 3659 aa, Homo sapiens
IKASFRTKVPEGLIVFAASPGNQEEYFALQLKKGRLYFLFDPQGSPVEVTTTNDHGKQYSDGKWHEIIAIRHQAFGQITLDGIYTGSSAILNGSTVIGDNTGVFLGGLPRSYTILRKDPEIIQKGFVGCLKDVHFMKNYNPSAIWEPLDWQSSEEQINVYNSWEGCPASLNEGAQFLGAGFLELHPYMFHGGMNFEISFKFRTDQLNGLLLFVYNKDGPDFLAMELKSGILTFRLNTSLAFTQVDLLLGLSYCNGKWNKVIIKKEGSFISASVNGLMKHASESGDQPLVVNSPVYVGGIPQELLNSYQHLCLEQGFGGCMKDVKFTRGAVVNLASVSSGAVRVNLDGCLSTDSAVNCRGNDSILVYQGKEQSVYEGGLQPFTEYLYRVIASHEGGSVYSDWSRGRTTGAAPQSVPTPSRVRSLNGYSIEVTWDEPVVRGVIEKYILKAYSEDSTRPPRMPSASAEFVNTSNLTGILTGLLPFKNYAVTLTACTLAGCTESSHALNISTPQEAPQEVQPPVAKSLPSSLLLSWNPPKKANGIITQYCLYMDGRLIYSGSEENYIVTDLAVFTPHQFLLSACTHVGCTNSSWVLLYTAQLPPEHVDSPVLTVLDSRTIHIQWKQPRKISGILERYVLYMSNHTHDFTIWSVIYNSTELFQDHMLQYVLPGNKYLIKLGACTGGGCTVSEASEALTDEDIPEGVPAPKAHSYSPDSFNVSWTEPEYPNGVITSYGLYLDGILIHNSSELSYRAYGFAPWSLHSFRVQACTAKGCALGPLVENRTLEAPPEGTVNVFVKTQGSRKAHVRWEAPFRPNGLLTHSVLFTGIFYVDPVGNNYTLLNVTKVMYSGEETNLWVLIDGLVPFTNYTVQVNISNSQGSLITDPITIAMPPGAPDGVLPPRLSSATPTSLQVVWSTPARNNAPGSPRYQLQMRSGDSTHGFLELFSNPSASLSYEVSDLQPYTEYMFRLVASNGFGSAHSSWIPFMTAEDKPGPVVPPILLDVKSRMMLVTWQHPRKSNGVITHYNIYLHGRLYLRTPGNVTNCTVMHLHPYTAYKFQVEACTSKGCSLSPESQTVWTLPGAPEGIPSPELFSDTPTSVIISWQPPTHPNGLVENFTIERRVKGKEEVTTLVTLPRSHSMRFIDKTSALSPWTKYEYRVLMSTLHGGTNSSAWVEVTTRPSRPAGVQPPVVTVLEPDAVQVTWKPPLIQNGDILSYEIHMPDPHITLTNVTSAVLSQKVTHLIPFTNYSVTIVACSGGNGYLGGCTESLPTYVTTHPTVPQNVGPLSVIPLSESYVVISWQPPSKPNGPNLRYELLRRKIQQPLASNPPEDLNRWHNIYSGTQWLYEDKGLSRFTTYEYMLFVHNSVGFTPSREVTVTTLAGLPERGANLTASVLNHTAIDVRWAKPTVQDLQGEVEYYTLFWSSATSNDSLKILPDVNSHVIGHLKPNTEYWIFISVFNGVHSINSAGLHATTCDGEPQGMLPPEVVIINSTAVRVIWTSPSNPNGVVTEYSIYVNNKLYKTGMNVPGSFILRDLSPFTIYDIQVEVCTIYACVKSNGTQITTVEDTPSDIPTPTIRGITSRSLQIDWVSPRKPNGIILGYDLLWKTWYPCAKTQKLVQDQSDELCKAVRCQKPESICGHICYSSEAKVCCNGVLYNPKPGHRCCEEKYIPFVLNSTGVCCGGRIQEAQPNHQCCSGYYARILPGEVCCPDEQHNRVSVGIGDSCCGRMPYSTSGNQICCAGRLHDGHGQKCCGRQIVSNDLECCGGEEGVVYNRLPGMFCCGQDYVNMSDTICCSASSGESKAHIKKNDPVPVKCCETELIPKSQKCCNGVGYNPLKYVCSDKISTGMMMKETKECRILCPASMEATEHCGRCDFNFTSHICTVIRGSHNSTGKASIEEMCSSAEETIHTGSVNTYSYTDVNLKPYMTYEYRISAWNSYGRGLSKAVRARTKEDVPQGVSPPTWTKIDNLEDTIVLNWRKPIQSNGPIIYYILLRNGIERFRGTSLSFSDKEGIQPFQEYSYQLKACTVAGCATSSKVVAATTQGVPESILPPSITALSAVALHLSWSVPEKSNGVIKEYQIRQVGKGLIHTDTTDRRQHTVTGLQPYTNYSFTLTACTSAGCTSSEPFLGQTLQAAPEGVWVTPRHIIINSTTVELYWSLPEKPNGLVSQYQLSRNGNLLFLGGSEEQNFTDKNLEPNSRYTYKLEVKTGGGSSASDDYIVQTPMSTPEEIYPPYNITVIGPYSIFVAWIPPGILIPEIPVEYNVLLNDGSVTPLAFSVGHHQSTLLENLTPFTQYEIRIQACQNGSCGVSSRMFVKTPEAAPMDLNSPVLKALGSACIEIKWMPPEKPNGIIINYFIYRRPAGIEEESVLFVWSEGALEFMDEGDTLRPFTLYEYRVRACNSKGSVESLWSLTQTLEAPPQDFPAPWAQATSAHSVLLNWTKPESPNGIISHYRVVYQERPDDPTFNSPTVHAFTVKGTSHQAHLYGLEPFTTYRIGVVAANHAGEILSPWTLIQTLESSPSGLRNFIVEQKENGRALLLQWSEPMRTNGVIKTYNIFSDGFLEYSGLNRQFLFRRLDPFTLYTLTLEACTRAGCAHSAPQPLWTDEAPPDSQLAPTVHSVKSTSVELSWSEPVNPNGKIIRYEVIRRCFEGKAWGNQTIQADEKIVFTEYNTERNTFMYNDTGLQPWTQCEYKIYTWNSAGHTCSSWNVVRTLQAPPEGLSPPVISYVSMNPQKLLISWIPPEQSNGIIQSYRLQRNEMLYPFSFDPVTFNYTDEELLPFSTYSYALQACTSGGCSTSKPTSITTLEAAPSEVSPPDLWAVSATQMNVCWSPPTVQNGKITKYLVRYDNKESLAGQGLCLLVSHLQPYSQYNFSLVACTNGGCTASVSKSAWTMEALPENMDSPTLQVTGSESIEITWKPPRNPNGQIRSYELRRDGTIVYTGLETRYRDFTLTPGVEYSYTVTASNSQGGILSPLVKDRTSPSAPSGMEPPKLQARGPQEILVNWDPPVRTNGDIINYTLFIRELFERETKIIHINTTHNSFGMQSYIVNQLKPFHRYEIRIQACTTLGCASSDWTFIQTPEIAPLMQPPPHLEVQMAPGGFQPTVSLLWTGPLQPNGKVLYYELYRRQIATQPRKSNPVLIYNGSSTSFIDSELLPFTEYEYQVWAVNSAGKAPSSWTWCRTGPAPPEGLRAPTFHVISSTQAVVNISAPGKPNGIVSLYRLFSSSAHGAETVLSEGMATQQTLHGLQAFTNYSIGVEACTCFNCCSKGPTAELRTHPAPPSGLSSPQIGTLASRTASFRWSPPMFPNGVIHSYELQFHVACPPDSALPCTPSQIETKYTGLGQKASLGGLQPYTTYKLRVVAHNEVGSTASEWISFTTQKELPQYRAPFSVDSNLSVVCVNWSDTFLLNGQLKEYVLTDGGRRVYSGLDTTLYIPRTADKTFFFQVICTTDEGSVKTPLIQYDTSTGLGLVLTTPGKKKGSRSKSTEFYSELWFIVLMAMLGLILLAIFLSLILQRKIHKEPYIRERPPLVPLQKRMSPLNVYPPGENHMGLADTKIPRSGTPVSIRSNRSACVLRIPSQNQTSLTYSQGSLHRSVSQLMDIQDKKVLMDNSLWEAIMGHNSGLYVDEEDLMNAIKDFSSVTKERTTFTDTHL

SEQ ID NO: 59 - protein, 1104 aa, Homo sapiens
TYNIFSDGFLEYSGLNRQFLFRRLDPFTLYTLTLEACTRAGCAHSAPQPLWTDEAPPDSQLAPTVHSVKSTSVELSWSEPVNPNGKIIRYEVIRRCFEGKAWGNQTIQADEKIVFTEYNTERNTFMYNDTGLQPWTQCEYKIYTWNSAGHTCSSWNVVRTLQAPPEGLSPPVISYVSMNPQKLLISWIPPEQSNGIIQSYRLQRNEMLYPFSFDPVTFNYTDEELLPFSTYSYALQACTSGGCSTSKPTSITTLEAAPSEVSPPDLWAVSATQMNVCWSPPTVQNGKITKYLVRYDNKESLAGQGLCLLVSHLQPYSQYNFSLVACTNGGCTASVSKSAWTMEALPENMDSPTLQVTGSESIEITWKPPRNPNGQIRSYELRRDGTIVYTGLETRYRDFTLTPGVEYSYTVTASNSQGGILSPLVKDRTSPSAPSGMEPPKLQARGPQEILVNWDPPVRTNGDIINYTLFIRELFERETKIIHINTTHNSFGMQSYIVNQLKPFHRYEIRIQACTTLGCASSDWTFIQTPEIAPLMQPPPHLEVQMAPGGFQPTVSLLWTGPLQPNGKVLYYELYRRQIATQPRKSNPVLIYNGSSTSFIDSELLPFTEYEYQVWAVNSAGKAPSSWTWCRTGPAPPEGLRAPTFHVISSTQAVVNISAPGKPNGIVSLYRLFSSSAHGAETVLSEGMATQQTLHGLQAFTNYSIGVEACTCFNCCSKGPTAELRTHPAPPSGLSSPQIGTLASRTASFRWSPPMFPNGVIHSYELQFHVACPPDSALPCTPSQIETKYTGLGQKASLGGLQPYTTYKLRVVAHNEVGSTASEWISFTTQKELPQYRAPFSVDSNLSVVCVNWSDTFLLNGQLKEYVLTDGGRRVYSGLDTTLYIPRTADKTFFFQVICTTDEGSVKTPLIQYDTSTGLGLVLTTPGKKKGSRSKSTEFYSELWFIVLMAMLGLILLAIFLSLILQRKIHKEPYIRERPPLVPLQKRMSPLNVYPPGENHMGLADTKIPRSGTPVSIRSNRSACVLRIPSQNQTSLTYSQGSLHRSVSQLMDIQDKKVLMDNSLWEAIMGHNSGLYVDEEDLMNAIKDFSSVTKERTTFTDTHL

SEQ ID NO: 60 - DNA, 194 bp, Homo sapiens
ggcttaggtgtgatcattgcaattttggatttaaatttctccgaagctttaatgatgttggatgtgagccctgccagtgtaacctccatggctcagtgaacaaattctgcaatcctcactctgggcagtgtagtgcaaaaaagaagccaaaggacttcagtgtgacacctgcagagaaaacttttatgggttag

SEQ ID NO: 61 - protein, 598 aa, Homo sapiens
YEIRIQACTTLGCASSDWTFIQTPEIAPLMQPPPHLEVQMAPGGFQPTVSLLWTGPLQPNGKVLYYELYRRQIATQPRKSNPVLIYNGSSTSFIDSELLPFTEYEYQVWAVNSAGKAPSSWTWCRTGPAPPEGLRAPTFHVISSTQAVVNISAPGKPNGIVSLYRLFSSSAHGAETVLSEGMATQQTLHGLQAFTNYSIGVEACTCFNCCSKGPTAELRTHPAPPSGLSSPQIGTLASRTASFRWSPPMFPNGVIHSYELQFHVACPPDSALPCTPSQIETKYTGLGQKASLGGLQPYTTYKLRVVAHNEVGSTASEWISFTTQKELPQYRAPFSVDSNLSVVCVNWSDTFLLNGQLKEYVLTDGGRRVYSGLDTTLYIPRTADKTFFFQVICTTDEGSVKTPLIQYDTSTGLGLVLTTPGKKKGSRSKSTEFYSELWFIVLMAMLGLILLAIFLSLILQRKIHKEPYIRERPPLVPLQKRMSPLNVYPPGENHMGLADTKIPRSGTPVSIRSNRSACVLRIPSQNQTSLTYSQGSLHRSVSQLMDIQDKKVLMDNSLWEAIMGHNSGLYVDEEDLMNAIKDFSSVTKERTTFTDTHL

SEQ ID NO: 62 - protein, 1298 aa, Homo sapiens
RPAGIEEESVLFVWSEGALEFMDEGDTLRPFTLYEYRVRACNSKGSVESLWSLTQTLEAPPQDFPAPWAQATSAHSVLLNWTKPESPNGIISHYRVVYQERPDDPTFNSPTVHAFTVKGTSHQAHLYGLEPFTTYRIGVVAANHAGEILSPWTLIQTLESSPSGLRNFIVEQKENGRALLLQWSEPMRTNGVIKTYNIFSDGFLEYSGLNRQFLFRRLDPFTLYTLTLEACTRAGCAHSAPQPLWTDEAPPDSQLAPTVHSVKSTSVELSWSEPVNPNGKIIRYEVIRRCFEGKAWGNQTIQADEKIVFTEYNTERNTFMYNDTGLQPWTQCEYKIYTWNSAGHTCSSWNVVRTLQAPPEGLSPPVISYVSMNPQKLLISWIPPEQSNGIIQSYRLQRNEMLYPFSFDPVTFNYTDEELLPFSTYSYALQACTSGGCSTSKPTSITTLEAAPSEVSPPDLWAVSATQMNVCWSPPTVQNGKITKYLVRYDNKESLAGQGLCLLVSHLQPYSQYNFSLVACTNGGCTASVSKSAWTMEALPENMDSPTLQVTGSESIEITWKPPRNPNGQIRSYELRRDGTIVYTGLETRYRDFTLTPGVEYSYTVTASNSQGGILSPLVKDRTSPSAPSGMEPPKLQARGPQEILVNWDPPVRTNGDIINYTLFIRELFERETKIIHINTTHNSFGMQSYIVNQLKPFHRYEIRIQACTTLGCASSDWTFIQTPEIAPLMQPPPHLEVQMAPGGFQPTVSLLWTGPLQPNGKVLYYELYRRQIATQPRKSNPVLIYNGSSTSFIDSELLPFTEYEYQVWAVNSAGKAPSSWTWCRTGPAPPEGLRAPTFHVISSTQAVVNISAPGKPNGIVSLYRLFSSSAHGAETVLSEGMATQQTLHGLQAFTNYSIGVEACTCFNCCSKGPTAELRTHPAPPSGLSSPQIGTLASRTASFRWSPPMFPNGVIHSYELQFHVACPPDSALPCTPSQIETKYTGLGQKASLGGLQPYTTYKLRVVAHNEVGSTASEWISFTTQKELPQYRAPFSVDSNLSVVCVNWSDTFLLNGQLKEYVLTDGGRRVYSGLDTTLYIPRTADKTFFFQVICTTDEGSVKTPLIQYDTSTGLGLVLTTPGKKKGSRSKSTEFYSELWFIVLMAMLGLILLAIFLSLILQRKIHKEPYIRERPPLVPLQKRMSPLNVYPPGENHMGLADTKIPRSGTPVSIRSNRSACVLRIPSQNQTSLTYSQGSLHRSVSQLMDIQDKKVLMDNSLWEAIMGHNSGLYVDEEDLMNAIKDFSSVTKERTTFTDTHL

SEQ ID NO: 63 - DNA, 807503 bp, Homo sapiens
tatagaaaaagtcacaattctaacagaagaagcataatggatagatgacagtgggaggtgggtgaagcctgcaattttgtctctccatgttgcttgaaagaaatctttttctacagtagtcatatattacttgtgtaattttaaaagacaaagaaaatgtatggggtgaaggaaggaataaactgatttttctcacctcgttaaatatgccttcacatatatttaaagcacatcagtcggaatgggtaccccttagcctacctatctcagattctgggaggtgttacctcaccttccttctctgtttcagaatcaatctgctgatgctggcagtcatactcctttctgtactgttttcagtaacagctcagtaatttgcctctattctccccttccctctccccattgcctctctctccttctttatggggtattcattccctgattttaaaattgccgaccatgcttttgtctttcccgctattcctatgttatttagtgaaagagaaaacatagtaaatgcacatggtacttgtagcttcaccctggtaatggcacatgtcacttctcacatttcattagctaaagcaagtcatatagccacttttacaatgggtaaaatggtatgtgccttcaaaaaaaagtatatatatgtgtatgtgtgtgtgtgtgtgtgtgtatacacagtaaaaaattgatggacagcatttgtgatgtgtgcatcttctcctccagacacctaggtcaaatatttatctttagactgtgttatctaaagtgatatacaaatttgatgatctcatgtccagtacttttcctttagtatttattttccttattttaattcactggcaaccaaaatgttaaatagaagcagtggtagtggtggctttgttctactcctgattttaacaaaaatgctaattattataaagaaggtttttatttttcatgatgttagtagttttcttgcaaatgacctatgttaagttacagaaacttctttctgtttttagtttattccatattttgggcctaaataaataaatcctttagtcaggattttggtcctaaataaatcatatgactttttccctttaagatattttatggtcaattatagtaatatattttctaattcaaatcagttttgcaaatcaaatcaaacttggtcaggagacttaatctttgtatacattccttgattcagcttgtctatgtttcatttagaatattttttgtatttatatatatgaatgcaattggccagtaatttttccttctcatatattcctgtctttcctaaatatcaatgttatattagcctcatcaaataagttgcgagaaagagaaaacaatataaattgggaaatagtccctcttattgctttaataagagggtaaagattggaattacattttcccagaatgtttggtataactaattacatcactatctggacccattgttttctttcagggaagaaatttaacaacagactgcttattcagtgaataaaatgatttgtgtttaatattttcattttttaaataatttattttcttgaagtataattgggatcaagcacacaaatcttgtgtataacttgatgaatttttttcaaatgtgaccccctgtgtaactgcaacccgtattaagatacagaatactattcaaggcactcctgcaggcttccctgaacccattcccatttgatcctctgccctaaagagagtattattctgacttctatcaccaaagattaactttgtctgtgtttgaacttcgtataaatggaatcaaacagcatgttcttgatatgtctggcttctttcactcaaaccatgtctgtgagatttatccacgttgttgcttgtaacagtagctcatttttcttccatcgtgttatattattgaattgtatgaatataccataatttattcatgcattctatagttgattgattgacatttgggttatttccaactctttcttcttagaatcagcttaggttggaaattgttttaggtatttgtctaatttgttcaagaattccagttaattgtcataaaattatctacaatattttgttatatttgtaatcacattgtatctgtagtttatgcctctatttttatatctaatattacttatacacccactgttttttatattgatcagttaggccagagttagtcaattttgatagtaaatccatgggtgccaaaatacccaggaataggggataccccttgtttcttctccattaatagagctaagcctcaagcacttgaaaaactaagctgattataggcttattatagtaagcttttccagactaatgagcagaacttgcttatagttgtctaactaaaatatcattttcttgactttttcaaaacaagaaaatcctgatgcaatgtgacttgatgtttttacaactagaaaaagaagttgctagttactctgtagtagcttgcaaaatgttcacaaattctttccgttcctgttagctgtgttcccctttgcagtgcgactttgccattcagtctttgataaggggagttgatttcaaaacccttgaatctgtgctaggtcacacgacttgctccagccaatggaacattagcaaatgtgatgtaagcagaggcttgaaaatactttcacattagggcctcccacgttatgttgctggaaaattttctgctgctatcagaatgagcctgcagtagactccaatgcctgtcaaaccaactgctaaatgagtgaggacgagtcagaccatccagccccagacaagcttatgcagaccagaactacctggtgaatccacagaaatgtcaagaaaggaaatagcccatggctacatatgtttaactagaggtgccctccatatacatctactttccttttaaaaaatctgtacttatttcccaggcacttataggggtgatggaactcttagtgtctaattcatttatcagatgcaccctcaggattgatagccctgaattgcaaaggttgagggatatgtgaatccattgtttgcctttgcaaataataggcagagtttcttaatgtggactagagttgctaatcttagattatccatttgagtcatgatttcctactatacaaagcaggagttgttatggggtagaagaatttttatcccaggaatgacaaagataagttgaagcactacagtaaaaaattagagttagacatggacacgtagaagggaacaacagactctacagactctaggacctacttgaggctgaagggtgggaggaggtggaagattgaaaaactacctatcaggtactgtgcttattacctggatgatgacataatctgtacatctaacccccatgacacacaatttacctatataacaaacctccaaatgtacccctgaacctaaaataaaagtttagaaaaaatgagaattagttcttggattcacaagatataaagagaagccagccattgaataccttgtttgaaagtaggttgacttcatgttttgtagcaggtctgaataatccatttgtctaattcactgtgctctataatacctattttcaaagatagtttcccaagttctgagaagtccttacatattagctgactttatactaaaatttgggtttaaaaaaatttttttttagagacatggtctcactctgtcatccaggttaaagtgcagtggtggtgtgataatagtttactgcagcctcgaaatcctgggctcaacaaccctcccacctcagcatcctaagtagctgggactacgagtgtgtgccaccatgcctggcttaaatttttttatttttatttttatttttattttttttttggagacgtgggatttcactatgttgcacagcatggtcttgaactcctggcttcaagcaatcctcccaccttggcctcccaaatccctaggaggcacaagcatgagccattgtgctttgccctaaaatttgttttaaattaaagtttttctggtaagaatgtaatagcgtattttgacaaagggtgagaaaggcttcttctggaagcaactaatgctaattgataaaattgatatataaatgggttgtggtttccagctctcttctgggagagaaataaaagggaatctaataaagaacaatgttggtttttctctggctgctttactaacaagaaacaccatgaaacatttctctcatttctaaacatttctataaaaaagataacttatagagaacaaaatcacaatcgaccagttatttcccaaacaaattttccatttttacaatacaaagggaaagctacaagtattagctgatttagaatatttctcatctaggatgagatgtcccagatggcagagtagagagagttttggatataattgaaactctatagaattggtggcaaatgtgcacatatacacacacacacacgttcctatccaattaagcagccaaaaagtcagcaatcccattgcttctttagtttaattaaagtcactgattttccaaacccaacatttagagatcacatcagatgctactcataatgtaaggaagcatgtattatggagaggttatcctgggtgaaaggtacagcaacaactgaatagtcaaccgaaacttctatcaatgggccaagctttgggagcatcaatatataaaagtttagaattccattttgtatcctcttctcccccaaaaagaaagagcactggaaattattccttgtgtggtgtttaatagtggtagatcattttgattaaggaattaaatggattgaggtgcatgagagcaagaaagaggaggggcaagaggggggattataggataaggtgtactgctactttaaaattatgtatgcatgatcccatccaggtccctcccactgcttgaggtaccagcggaaagcttgggcagctcagttccaagagggccaccaagcagaccacgctctgagcttcaggtaaccaagtgtttgctctgcagaatactttacctgggcacccaagtcttccttccagcattcctgctgctacagcctatttgctgagtaaccaggggttacagcagcgttgccaggcaacgagggacagcggtcctgttgaagagccatttgtcacactgaggggactggttgaaatgcaataaagaaatggtaactcagcttatttatcaatacaattacttgcacagtattagggatccatgtgtaacctacaaattcatagtcatatgaggaaacacagaaacattttgctaaatattaaagcataggacagacagatggtgttgggtttctaatcagctttactctgagcttaaagttgctgcacatgctgggataaggggaaaggcccaaagtcctttgccagctttattttgggcatctgtaagttagctctgggttacaatgtacagtgcatgtgtaaagaaaatctacaagattcttttccctgttaagtagagctggtaatgccattgctaattccctggggtgaagtaacaacacaaaattattgtatgtgtaatatattattaataattatatatatataaaacacacacatatattatataaatatttatgtataactggttataaatattactggttgtcctgtggacttataaagtgcttgatttgcccaatgcaatcaagagatttaccaaaaggatgagtattttactctgagcactgtgcttcaaaatgttttttgagaagttcagtagtgttgcttctaggagctcaaagtcctcaggcctgggatgagcttcagttttaaaggtgcagcagctttcccttgacgccctacgtttttgattcccagataccagcagctactcatgtcttcgccattgctaagaacgtcgttggtattaccttactctgagaacgtgtctgcagtttccagaaaatggagtatcgcaacatcacttaaagtaccctgcttcaaagtattgctggcaagtggcgtgggcctgattatttatttagaaatgctttatcaggaggagaatgcttttttgtaaacatgaattgcccagttctttcattgggctctggcttcttgtttcaggtcattgaaatgttgatctttgcctattttgcttcaatatccttgactgagtcacgaggtcttttcccaaggctggagaacgtgggagctttcaagaaagtttccatcgtgccaacccaagcagtatgtggactcccagaccgaagcactttttgtcacagctctgctgctgctgaaagtattcagttctgtacccagcggttttgtattcaggattgcccatacagatcttcacaccctacctacactgcccttttctcagcaggcctcagtagctgcatcacaccagacaagaatgatctgcatcctaacgcccatagcaattctgcaagttttatttttggaaatcacaagagctgcttttcttctcctccttctccaaagctgatggcatcatttaccttagctgtatggctgaaacctgagcaacaaggtgtaatgtaagtagtagtgtaggtataagctttcataggtccccaaaaccagtagtagtgaagatcatttcagcctgaattccaaaccggaagtgaaggctatatagaattcatggtattgaagactaactcttccagttgtttccccaattaaaatttttttctcttctatggatgaaatggaccatgaaaaaaaatgtgaaaatagtttatcaaaggcaaatgtgtttatgcaggaatcatttattttctatagcttagcgcgacctttggtcttagccttcaaagcctaaagaagactcagagtgagttttaaggcatggaaacttgtaattaatacaaataattaatattttcaaaatcttgaactgggtttatataatcaacatttccttactagggtataacattttcattaggcagatagttctcccagtccttgggactgttttcttcatcctcgtttccccaagaagagctgtttgtttgactcatggaagatgttcagtaatataaattgaatatataaataaccctccatctctaaaaacatatagcttttagttctttatcttgtggtattttcattttccaattagttaggaaatatgtaggtaagtgtgagagattctcaaaagctttcatgctgttcatcccagagaaatgccttcaatgagtctgggtcttattactgccattttttgttatttaatcaccagtttttcattctgtaatcttttctcaagctgatatctaatgagtttcttctaaatatttattgccaacctggagattttaatatacaggacagttttgaggaatttttgcttatcttttttcttcctagagggcttttggccctttctcttgtgacattttctgtgtgtgacagcgttggctggatatctaaaaacttgtgaaacaaaccagaaaaggattacaatctcataagcaaataggacttaaatgtttttggtgtttagtttcaatttgccaagtgaaagttggcatgtcttcattttgttttaaatttggattaatcacaaaattaatcacaaaccattcccatttctacatctctcctcaaagaaaaccttgttttcttactgtttgaaattctagtaaattcaagctactcagtttatataattaacatctgaagagtcttaaaacattgtcttttgacaaatagggctaagataaaatatccttctgagcttgtagggacatatctgtaccaaattcatcttctattgacatcattttgtataaataagacagagaagtatttacagggttggaagaacatggttaatggttttgagagttccttgtatcaaggtcgtttccattttcaaaattaaaatacctttgggaattgggggaatttcggggtgtttgcactagataagtaaaacaaacaaaacatggattatccaattattgtttattcaggagcagaataaatccagttcctaaatattttgctacctgccttcctctcacatttattatctaccaaagctagtatgtttacaagcaaacaaaatagcaaggaagataatcaataacatattaagaaatgcattttcagtaagcttgggaaaataagtctgcatttggtaaatacattcttgagtaatggtcgaattctcacttgtagatttaaacagaagaaaaatgaataggggcaaactcttttcaggttaagacctgatgggtagggataaaaacaaattcacttcagtaaattagaaatattcaactactgaagggttaaaaatataatttgcagtagaatttatataaaacttttatttctacttatataaaacctttatgtcatctaaatctatttgcctaaattaaaaatatacttgcactcataactttataccaaatatacatacaaaatatagtaaaattgtgacagtaaatgagggactattagtgttttacaatcttattcttacctcccaactcaggaaaaaaatagatgcaagtgatagatgcaagtgagaagaaattatgtgtgaaaaacatgccctttaaggaaagctttaaaccatctttagcagtaattcttgattggctcaattttatacatttgcctctctgatacttcctaccaaatttgatcacaaactcatcattttttgagagactactgtatcctaggtgtttgtgtgtgtatcctcagaatactcatgatctaaatgatctaatggagtgtacagatggatgagtgttattacctaggcagcacagtgtgttaagtgagcacaaagtgagacccctcaaccgaccctgagcaggaagaagggtgccaggaccaagcataatcattcagataccaaagctaagtaggaggtaaccaggtgaagaagagacctcaaggtctgaaaggtgtgtcactctaataagggtagagataacttaaaataatttgataactgccctgacacaagacctggaagttttctgaaaactcttctagtttttcaaaatcttatttcactgtgttctagaaggctgaaggacctttcacctcagatatttaacatgatctcagtacctcagttggactgtacggtcatggagaggtagccagtcatcttacagacactggctttggctttgtgccagttgatgatggggtgagtagagactatagctgtccattcttcatttcaccatgggaattaaatagagtgattctgacttcagggctaccaatttagagccttccatggacactaaatttgctttacattaaaaaaaaatttttgcactgatgacttaatactcaagcggcctgtagtgtgttgtaccacttcctctaaaagaaatagcaggagaactaatgagccaataacctaaatgttagttttgcagaatgattcaaccactttagtttccatcatgaatctctaatgaagggtgctgaggctctggggaatatattgtaaataagaattctattttttattgaaataaaggggcttcttcattggaataaagctttcattgaatataatgacattcaggcacttattcatagtacaccattttgagcaaagtttgaggtcattttaacaccactgtaactgcacaataccttagcatgtctttttggttggatgctgaccttttctctcttttccggttgcttcctaaggtgtgttatagaaaagacagtagatgggcagattgtgttcaaacttacaatatctgagaaagagaccatgttttattatcgcacagtaaatggtttgcaacctccaataaaagtaatgacactggggagaattcttgtgaagaaatggattcatcttagtgtgcaggtgagtaaaataaaaaatatttaacatttggttaaacacaaggatttgtcttcctttctctcttttaaatggcatctactcacaaaatctgcagcagtatcttttagatttcaggtgtgtataaatgacaactaaagaagaaaaatatttaaatgacctaatgatgtatctcttgatatactagcatttcctcccccaaaattgctgtaaaagctctcacagaaacttaaagacaatgctatctgtaattgtaatatcctcagaaaatttttgttttcttgggttcgtatattctattttgtttaaaaatgtgtaagggctcatttgatgtctggtactaattttactagtcatggatgtattaataccccagcttgatttttacatctgtctttctcagcagctgatgatgtgaataaaatttgtctgttgcattaaaatggtgaccttagaactaatgaactttacacttgaggcactcaaaaggtgttatattattattttagttgtcaaccacagtttgtatgagccttagaagctgctaaaggctgagagagctgtgacatgtctggtatttacagtctccagaagagaggcacagttcatccttttgttttttcagggcactggaatggcccaatacagttaaagccacacctgcctttcaaaccaggtgtattagtccattcttccactactataaaaaataccggagactgggtaatttattataaagaaaagaggttcaattggctcatggttctgtgggctatacaggaagcatgattctggcatctgctcagcttctggggagaccttagaaaacttacaatcacggcagcagacaaaggctgagcaagcacttcatgtggccagaatagggaggaaaagaaagaaagggaggtacttcacacttttaaaccaccagatctcatgagaattctatcaggagactagcactaggtggatggtgttaaagtactgatgagaaaacgtctacatgttccaataacctcccatcaggccccaccaccaaagctggggattacaattggacatgaggtttgggtggggacacagagccaaatcatgtaacttggggtgctgggtaccacagtttccagtatgagctctcatatgagcatccatccagtggctcatgtgaacctcatttgaactagaggacatttacatccttgttcattttataaaaattatctttgatttctcacttttttttttttttttaatcttgaagcagataatgagtgtgcgtcctcagagggtcttgataattgttcattgttttggctttcagatactaagatatgagtttagcaaatgtgattggcaggggtcagagttttcatacacaactagggttgaaatgatacacaaaggggacgtcatgtctgacgtcaagccttgtgcataggacatgatggtttctgattctcaatgcttattctccatgtgttcagtagttaacagataggagaccaatttgtcctagtcttgaagtttccattgtcttgaagtctccattctgcccactgaccagtcctacagaattgggttttaatattaaaaacgtagaaatagaaacttttaaagacagtgccatctttgcagaagatgccaaatagatatgtttgttgcatatttttgtatcaacaatgacaaaaaaattatctttacttgcctttattttgtgttatctgtgaaactgtgccatgttttggcaggcagtagtacattaaaagcttcacaaagaaagtttaaaatctaaatgcagagcggtaaccatgactgaattactcccttggggataaaatgctcttagagtgcctactgaaatcagcattatcatttcaatacatgtcaaatatgagtcatttactagtttaggcaaaatttcttcatgaatctttaaatctttctcttctttcaagaaaaggttaaagtacttatgatttaatgagactgctttatttcataactgtttgactatcaagagaaaacttgtccttttcgatttgtacactcttttatttatttttttgcataagttttaaactattctgcattttatattaaaactacagaactaggcagtcacaaaatgttagaaaaccattcagatctgtcatttaatcatctagcacttattaaatatttgaggggtatgcagcattatgggaatctggatttattcaaatgaaaattaaagagcaattatttactctaaaatggagctctatataaggttcctttatattggacaacagtctgaatatgtttaaggtattatgaaatttataaaaatccatattatagatttttttttgagacagagtttctcccttgttgcccaggctggagtgcaatggcatgatcttggctcactgcaacctccgtctcctgagttcaagagattatcctgcctcagcctcccaagtagctgagattacaggtgcctacaaccacactggctaattttttgtatttttagtagagaaggagtttcaccattgttggccaggctggtctcgaattcctgacctcaggtgatccacctgccttggcctcccaaagtgatggtattacaggcatgagccagagtgcccagcctagattttgaaaaaggaatgtactgattactcaaaagttgttataagaaataatggaggccaggcgcagtggttcatgcctgtaatcccagcattttgggaggtagaagtgaacggatagctcgaaccaggagttcgaggccagcctgggcaacatggcaaaacctcatctctacgaaaaaacaccctaaaaaaattagccaggtgtgatggtgcgtgtctgtagacccagctactcaggaggttggggctaaagtgaaaagatcacctaagcctggaagtcaaggcttcagtgacccatgatcatgccactgcattccagcctgggcgaaagagcaagatcctgtctgaaaaaaaaaaaaaaaaaaaaaaaaagtgacaggaaggacaggagattaggagttgggaaatctgatttaggttatgctactctgtagtcttaagaataaaatttataggaatccatatgatagttgtttaataaggaatgtactaattgcttaaacgttgttataagaagtaatggaagctgggcacagtggctcacacctataccctgcccgccttgacgtctcaaactgagtcatttgactcagttttcctatttacataagaagattgaactagatgaacaaaatgagggccttttgaattcttcataaacaagtaagtggagtgtggagtgtagcacaagtcattaaagtatggcaagctgttgagttgtgtagggttatttaggtagtaagtgacagagccagccccattaaccaatgatcagtcttgtgctttttttctcttctcccatgctgcttggcatttacataaaaacatttttttgctagattttctggacaaaatatagagaaatgtagattgttactattccattgtataactgcaagaacatttccagaaaaaatattttagtataaaatgtaacttactgttgcatgattatataatgcatctaaactccatttaatttggggattagggacttttatcatgctgggcataggacagaacaaatgattaataatcttgtttagtcaagtttcaaactacaaacctgcactttatgtatatgtggattttcacccatcttccaaatggccacaaattgatgaatttatatagtgtgtgtgtttctgtgcatgtgaaaaaataaaacatacaactctattcgtggaatggcccagaaaccagaattttagttcgttgcttatagtgattttttactggttagcttatacctggtggcataaaattaattagcagatctcaacttatgctttatctcagacagttcacttgtatcagctttccatcagtaaaatcagaattctaatttaccaaaatcagaaaaaaaattattttaaataattaaatatctgggggaaaagatgtcaggaaatccagacataccaaaattggaaatcgaatttcctaaacaaacaaatagacaatatgctcaatattgctatggtaatgaatctcacagcttttattccaaaactagcattttaaagtgtcaatctgttggaaaatgattagtgtttaaattaatattcatttatggacttgaatctgacaggattgccaattgaaattttactttggggtttaatatattggctatttcaaattatatcaagctaaaattcattgtgtcattttttatactaaaactagaaaaaatcaattcatagtttttattatcatatagggaacactgatcatattagcaaaatttttaaagcttagttttcatattaaatcagcacatgctgtagttataagatttcctttggttactcttataaaagttttgaaatatgtaaaaaaatttactttagcatttcgttatggattggtaggtaaaacaatatggaaataagtatatgtgtttagtggcatttcatttaaaagtaaaactttagggttttctttgacaatatattttgccttaagcagttccacacattttatagcccaaatagtgtcaaagaatcatcagtatagtcatccttctagtaattatgcagaattgcagtaaaacaattactacgatttgaagctgatgaaatactacagctgtggaaccaagaaatgatttagcattgggcttgttcacattttctatgctattttcagggctccttgatacattgacaattcaagagccatagatgactctagctacaatagtgtgaaaaagagcagttctaatatgatacaatgaagaaaaaaatgcatgggtaaataaagttttaggaatcaatatatgaaggataggagtttcataatcacagttcatgaagtatgctcttttgatttatgtattcaatctaagaaagaaaaactattgatagttctggaggaaaacaaaatgcaatttaaccaacatttgttagaatagataaaccaagtctctcaattaatctctgaactgtatgcccatgtgcacactttataaaggtgtttccatgttcctattgattgagggaacataaaacatccatgtcaccttatggaagcctcctcattcagttcagtaagctttatggcatagaattgtcataggaataccatcccagccccactcccattctaagagaatctcaacccatattatttctttaatatatcattgcatttagctctgactctgtgtgtgtgtgtatgtgtgtgtaagtatgcatgcatatgtgtgctaaatgtttctttgtgcaaagccttctctttatatctagccagctgggttaacagctcaagttagttgaatagttttgggttattcaaaataaattaagatcaatagaatataatgaagtttttcagaacaatcagttacaaattatcatagctgctattaatcattgatttatgtgcactatattaaacatgttacatatttgcagttatacaatgaaatagtgacatgcttgtaacatgtttaatatagtgttaataatagctctgtgccactgacttatattatctccatgacagagattttaaaaaattagccttaggaaatttaaactacctgcctacatttatagtcccaagcttctctgaccttaaactaaaagtaataacttgccatgaacatgggtcactgagcagatctaaataatagtttttaaaattctccaaaccaaaaaaaaaaggcacagaatcccaaaagaactgaaaacatatatttataatgtaaatataattttgtatatttatacatatttgtaatataaatattttcaatgcttcagatatttacatgatttatacaaataattaaagtcaatatattttttaactatacccctcattgatacaagcaatttaaatgtacaacagaatgtaattttgtataaagttctgcgcaatattttcatgttttatggcagttgcgatagactacaatggcttaaagaaagaatatttcccttaagccagcctgatcacctgacccatgccttatagaatcaacccttattacaataaaatacaaagaaggaagcacttcctactttattatggaagaggtaaaaccatccaagtaaaaaagtaattattctctgtacgttttttgcatgtgattttaaaatgcaatatttaagcagaaggcaaggctttaattcttgaccttttagtaaaaaattgtgcaaccctgggaaaactatgtaactcctcaaaatgttaggatacccattacaaattggaaacaaacaaacttggcctatttagcttacaccataaatttgaacatataaagaaaatattgtctactaaaacactttatagcctataacttcctgctatgaaggagcttacagtctcttcagaggataagcaatcaaataattacacaaataaaggcaaaattataattgtggtaagtgctacatgatcacatgaagaatgatttggtcaaaccactgaagtcaagaaaagcttccttgagtaaatgttattgaatatgtgtattagttttctaggcctgtactaaaaaattatcacaaactggtggcttaacacaacagttaattcattgttgaagagttctggaggctagaaagctgaaatcaagttgttagaagggccatgctctttctgaaacctctagaatccttccttgtctcttccagcatctggtgtttgcacagacaccagagtatgtgattgtgctacctcctggggtttgtctgcccacagcaaggccgggaacccagaaaagaaaagaggagtgcccagtgtagccaccacccactgcatgagaaacagagctggcagcaatccttgatgctccttagcttgtagctacatcactccagcctctgtctgcattatcatatggtcctctcctctgatcgtgtgtgtcttctcttcttataaggacatcagttgtactggattaggattcttcctaattcggtaggactcatcttaacaattacatccaaaaagacactacccaaataaggtcagagtcacaggcacatagggttagggcttcagtatgacttttgatgggacacagttcaactgatagtaagatttattcaaaagaatgcataggatccaactgggcaaagagaattgataagaacattccataaatgcatagcaaatagtgtaaatgcccttgtataaaaagaaatatgttacatagactaaaaaaccaaagtggttagagtgtcgctggcaaagtgggacatggtgtgaaatgaggacagaacagtaggaagaggctatgtgttaaagagaatcactggatatgttaagattttttttttaaatggaactctattgaactgttttatgtgaaggacaggagatgagggatgaggataaggaaggaaaacgtatgatatgcacagattattttttcctaaagatcactttggctgcagtgagggagaatggtttgcttgaagacaagtgtgaagggttgttatggtattttcatggaccaagtcagatgtaagtgttacttacttacagcatgaagacaatagtgaatatgcaaatgaatggtcagctttgagaggagtttaagaattaaattaaagggcttgttgatgaaggaatatgtaatatgagggaaagggagttgatgaatcccagctttctggcttatgtaattgcaggtacagtgatttctttttctcaaatagaaatactggaagagaatcagattttggatgtggagcacatatgaattagattccagtttagggtaataattctcaactatagaaattattagcattattgagaaactttaaaaaatattctgatgtccatatccctttatgtcttcattggtctaggtggggcgcaggcattatttctttctttcttccttccctgatggatttaaaaaggtgtaacaaaagaaaatatcagtctaccattgatgagcatttaggttggttccatatctttgctattgtgaacagtgctgcaacgaatatacatgtgcatgcgtctttatgatagaatgactcagattcctttggatatatacgcaggaatggaattgctgggtataatggtagttctgttttttttggtctttgaggaattgtcacactgttttctgtaatggttgaagtaatttacactcccaacatcagcctattaagcattcctttttctctgcaacctcactagcactgttgtttcttgactttttaataacagacattctgactgatgtgagatggtatctttcattgtggttttgattgacattgctctgatgatcagcgatcatatgcttgttggccacatgtatgtcttcttttgaaaagggtctatttatgtcctttgcccactttttaatagggttgtttttttcttgtagatttgttgaagtttgttatagaggccagctatcagacctttgccagatgtatagtttgcaaaacttttctctcactctataggttatctgttcactctgttgatagttcgttttgctgtgcagaagctctttaatttaatttgatcccatttgtcattgcttttggcatctctgtcgtgaaatctttgcctgttcctatttcctatgtccagaatgctattgcctagattgtctttcaggcttttagttttgggttttacgtttaagtctttattccaacttgagttgatttttatatatggtataaggaaggggtccagtttcaatcttctgcatatggctagccagttatcccaacatttattgaatagggagtcctttccccattgcttgtttttgtcagctttctcaaagatcagatggtggtaggtgtgatggccttatttctgggctctctattctttttcttcggtctatgtgtctgtttttgtaccagattcatgctgttttgcttactgtagccctgtagtatagtttgcagtcaagtaatgcaatgcctccacctttgttatttttgtgtaggattctctgtctatttgggctcatttttggttttatatgaatttaaaaagtttttttctagttattccaagaatgtcgttgtttgtttgatagaaatagcactgaatctgtaaattgctttgggcaatatggccattttaacgatattggtccttcctattcatgagcatggaatgtcacacaaaccaatgatatctgtttgtgtcatctctgatttatttgagcagtgctttgcatttctcattgtacagatctttcccctccctggttaactgtattcctggtattttattctttttgtggcgattgtttcacctgcttctaatcaaatctatttagtagctgttattaaactgtgtagccattagtatacagtagtactccattacccttggctttgctttctgttgtttgtcacccacagtcaaccacagtctgaaaatatcaaatggaaaatttcagaagtaaacaattcataagttttaaattgggtgctgttctgtgtagtgtgatgacatgtgaggtggtcaccatacctcctgcctgggaggtgaagcatccctttgtccagcagcttctccatattgtctatgctcctagcccttcagtcacatagtagctctcttagtaatcagatcagctgttgctgtatcacagttgtaacttgtgttcaaggaaactgtatttcacttcttaatggccccaaagtgcaataatagtaatgctggcaatttggctatgccaagaagccataaagtccctcttttaagtgaaaaggtaaacactctcaacttaacaaatgaaagagaaaagatcatatgctgaaattactaagaacttcagtgtaagaatgtatcttctgtccatgaaattctgaacaatgtattgttataattattctattttgatagttattgttaatctcttactgggcctaatttataaaaattaaactttatcttgggtatgtatgtataggaaaaaacatagcatatattgggttcagtaatatccacggtttcaggcattcactgggagtcttgcaacatatcctcaatggataaagggggactactgtatgcgcaatatatgtatacgcttaaaaagagttttgtttagctagtgtgtgtaagaagattatcacaagtcacactgtagtgtttgccttttgccagtctgaatgttatcatcagtctaatattttatagcaaagatttaagttcattgaaaacttccctatggaaacacttccaatcaagacctacagcaagccatgaataaattaacatttaaacatgaaaactgatatttgaagaagaattagcaattaataatttctgctagaaaatggtggtttctcagccaatagctataaattgtataatatatgtaaaaggaaatatatacaaatatcatatgggacatatatcacatatactactaaaattgaaaattgctataaatagaagactatgttccaatgtccactgatttttttttttttaacaatctctagtcttgaaaatgccactatggtaattctgtcaaatttgtaatggttgggatttgatggtagtgcttttgaaacctgtattatctaatggaattgtcatttatattatatcattttcacctaaaagccaaatacaataagacttaaattatttttgctttttttgtggatagtcatttttgtgcccaaagggctaactgatgccttcagttatacatgaacaattcgcactaacgtcaggaagaacagtgtgcatataacctagggcagaatttggtctatggaatgtatcactcagtagtggaatggagattatgactttatttaaacatggacttgagtagttttatttttccttactgtttcccttggcatttctttctctaaagtgcaacattcaaaagtattctatgcagctgtagtgtcctggatgcataataagggcatatgttcaaggcaagtttaaatatccacataagccaaagacagagtaattaacattaaaaaaattaagacaacttttccaagaatgaaaagctttaatagattagctaattttagaattatttaacaacaactgtgaaaaattattagtatttacaaatatgtatatataaatatatgtaatgtcttatgttagacagcaatttcattctgctctctaatgattacatgacatacttctgaaaaaagtcaaacagtgtgttctagaaggacaaagaaataattggttcagttttgcttatacttagtgttcaattgttatcaacctggggtgggaggaagggaaagaaagagggaaggacagaagagagcaagaaaagaaggaaggaggagaggaaggagagatggaagtcatgtgacatagctagggatttggggcaaaattcaagacccatgttttccttgatggaaagccaaggaacctgagaaggagagtcagcccatgccaatttcactgtggtagaggtgaccaagaaagtttacattatggatgtatagtaggtaattttaggttgtttttgtctgggatataaacccattgtgttattccagttatttggccaaaatgttccatgcaaccattttggagtgctagcactttagggaatttataaaaaggggtggtgttcagtgtctgggttgaatacaaggtaggtagaaaaggacaatcaaaggaattagctgcaaatgagatgaaatctatgggaacatatattgagaaaactagtgaccattataatttaatcctctgaaatacctgcaacaatctgagaacaaggtaggtggcaagatgcatttataaatattaaagaaacacaagaccccatacactttgaaaactggggagtaccgaacttggagaggtctagtataggtagtgcttgttggtttgcatatttttaaaaccactttattgaggtctgattgacatagaaaagtctgtccatgttgcatgtatgcaacttaatgagtctaaagataaatatatgcccatgaaagtatcaccataatctgtggcataaacatatccacctatttgtttattcttaattaaactttttcctgagataattgtaggttcacaggcacttgtgagaaataatacagaagtcccatgtaccctttactcatttgttctcatcagtaacatcttttataactatggtacaatattacgaccaggatatggacattaatataaccaatattattcacatttcccatttttcatatattcctatgtgtatatgtttagatccatatgattttattaaaattttatccaccacagccgagttgcagaaaagttccatccctacaaggacacctcaagctgcctttttataaccatgcccactgtctcccttcccctactgctgccacaggtgtccctaacttctggcaaccactcacttgtactctatttctaaaatttggtcttttcaaaatgttgtatacatgacatcacacaatatgtactcttttgggattgtttctttcttttttactcaacataattccgtggggattcattcaagttgttaagggcattgatagtccaccttattgcagcatagcattccacggtatgtgggtaccatggtttgtttaacccttcacccattgaaggacatctaggttaattctagttttgggttgtatcaaacacagttaaagcattcgtgtggatgtttttgttaacatacatattcgtttctctggaataaatgctcaagagtgcaatagcgtatggcagttgcatgtgtgtgttttaagaaactcatttccagagtggctgttccattttagaatcccaccagtgatgtatgagtgctccagattgtgcacatcctttgtagcatttaaaataaaggctacatttattttactatttaaaataacattttagccattctgatagataatatatcactgtggttttattttgcatttctttaatgactaatggtgttcagcatattttcatgtgcttatttaccattcatatgtccaattcggtgatgtctccccatgtcttctgcccattttctaatttgattgcttatttgtagcttgctgtttttattctttttacagggttttgctgagattgattaggtccaatttatcaatctttcctcttatgtattgtgttttccatgtcaagtctatgaagtcttgcctaaccctaaatcctgagtattttttctaaaagattttttttattttatattgttaaatttaagtatgtgtttcaggccaggcatggtggctcatgcctgtaatccccacacgtcaggatgctgaggtgggtgaattgcttgagcccaggacttcgagaccagcctgggcaccttgtctttacgaaaaattggctgggcatggtgctgtgtgtctgtagttccacctatgggggaggctgaggtgggagaatcagttgagctctggagtttgagaccagcctgggcaccttttctttacaaaacattggctgggcatggtgctgtgtgtctgtagttccacctatgggggaggctgaggtgggagaatcagttgagctctggagtttgagaccagcctgggcaacttggtgaaacctcgtctctactaaaaatacaaaaacaattagccaggcatagtggagtgcacctgtagtcccaactgctcaggagctgaggaaggaagatcacctgacctcaggaagttgaggctgctgtgagcagagatcatgccactgcactccagcctgggcaacagagtgagaccctgtcttaaaaaaaaaaaaaaaaaaaaagcctatgtttcactttgagttaatatttttttaaggtgtgagatttggttttgagcagtggatgtccaaatagcccttagttgaaaaggctatatccttccttcactgaattgctttggcacatttgtcaaaaattagtagaagatatttatgttgatttatttcagaattctatgtatatccttccaccaattccacatgttcttgagtactgtgagctataatatctagtagagcgactccttctactttatcctgctatttcaattacaaaaaataataaaccttttagggcctatgattttccatataaatttcacaataagcttgttgatgttttcaaaatatcttgtttagattttgataggaattgcattatatctatagatggatttggagtgatttgaaatcttttactatattgagtcctctaatatataaacatggtgtaagtatcaccatttaggtcctcttttattggcattttgtaatttttagcacatacattgtattagtctgttctcaccctgctataaagatactaccagagactgggtaatttataaagaaaagaggtttaattgacttggtttcacatggctggggaggcctcaggaaacttacaatcatggtggaaggtgaagggaaagcaaggaccttcctcacgtggcgtcaggagagagaagagtgaggtgtgaaggggaaagatccccttattaagccatcagatctcgtgagaactcactcactatcatgagaacagcatgtgggaaactgcccccatgatctaatcacctcccgccaggtgcctccctagacacgtggggattatggggattatacagttcaagatgatatttgggtggagacacagccaaactatatcatacatcctgcacctgttttgttgagcttacccataaagtgtttcattttctttttggtgattgtaattggttttgtgttttaaattttggcttctgcatgattattgttggtatatagcaatgttatgaattttctagggtgatcttgtatttcaaaactttgctgaactcacatttatagtagttctggaaattctttatttgttggaattttctacatagacaatcatgacatctgaatttggagcagtttttttaatctttccaatatgtagtttttatttctttttccttactgcagtgactagaatttttagtagtatgttgaataagaaaggtaagagcagagattcttgctcttcttgttcctaatcttaggaagaaaaagagttcaactttcaccattaagtatgatgttagctgtagattgtttgggtaagtgttctttatcaaattaatgaagttcctctctattcctaatttcttggagttttgagtattaaatattgtcacaaggcattttctgattcaattgatatgattatatgatttttcttctttagtctattaatgtggttgattacactgattgattttcaattgttgaaccaaccttacatacctgaaataaatcctacttggtcatagtatacaattatagtatatgtagtatacaattccttttatatagtgctgaattgatttgctcttctttctctagtttcttgaggtagaaacttaatgttttaagatccttcctcttttctcatataagtattagatttagcttagtgttgtaatttaatgtgtaatttaatttagtatttaatttagtttagtgcaataaatttccccttccacgctgctttagcagcatctgacatattttattatgttgtatgtttgactcttggacaaaatgagggcttggggtattgactcccgatggagttaaaaatttgcatttaacttttgaccaccccaaaatgtaactactaatagcctactgttgaatggaagccttaccaataagataaatggtccattaacacatattttgcatgttatatgttttacgtgctgtattcttataattaaatagagaaagaaaacattgttaagataattataaggaagataaatatatatttactattcattaagtgggagtggatcattatataagtcttcatgctcattattttcacattgagtaggctgaggaggaggagaaagaagggttggccttgttgtctcaggtggcaaaggcagaagaaaatttgtatataagtgaatctgtgtagttcaaacctgtgttgttcaaaggtcagctatattttcatgtgcattcagttctatgtttttgaaatttcctttgaggttttcaaaattttcttttacaactttctttttgactcatgggttatatagagatgtattgtttagtttcaaataaattggagattttaaatattataattctgttattgatttcaaatttgaatcattttcaatcagagaacacattcagtgtgaattcagttctttaacatttgttcaggattttttaacaggccagaatgtagtctatcttggtgaaagtttcacaagtatttgaaattaatgtgtatagtttgttttgtgtttacacacgcacacaaacacagatgcatacacatataaatcttctgttatctttttatttctatttaaagaacttcttttagtcattatttaagagtaggtgtgaagaaaaccaattctcttataaatagaactaagtacatctactttgtatacttttcttgagtgattctatattgtaatgatgtcctttttactagttctatcaattgctgagagtttgctgttgacgtccctgatttaattgtgggcttatctatttctcctttcagctgtatcagtcttgcttcatgcatgttaaagttctgttgttaggtgcatacatgtttaggatcattaggtctttctagtggagatatcattttatcattatgtaatgtccctcttaacctctagatatttggtttgttctgaaatctatgctatttgatagttactagttattccttttttcttttgattaatgtttgcagatatatttttctgattactaatttcaactgacctgtgttgatgtccatgaagtgaatgttgtacagatagcatattttttggatacttttttaaaaattaagtttatattctaatacactctgctaatctctgtcatttatttgtatatttagaccatttacatctgagattcttactgatatgctagccttatgtgtgcaattttattttttctatttcttgtctgttgtgggtctctgcatttctcttttctgaccttgctgtaggttacgtgaacacattttaggattctatcttggtgttttaacagcattttgggtatatcttttttgtatagtgtttttagtggctctaggtattaaagtatatgtaagtcacttatctactgacatggacatattactacttccattaaagtgtacttttatttccacttaggtcctttactcattctaccttttcagtataattgtcttaagtgtttcccctacatacagtgagcatcacattacactgagttgtaatttttgcttcaaccgtgaaatattatctagcaaactaataagagggaaagtctaacttatttccccctaattttattcattctgatattcttattttctttataagttctgaagcttttattatcattttgtttctatttaaagaacttcctttagtcatcctttaagaatgggtttgatgaaaacaaatactcttatttttcactcatctgagagtgtcttgatttttccttcattccgaaaggatatttttgctggatataaaatttatgattgacagttaattgctttcattacttgataaatgttgtgccactccttctggcttctaatttttcagatgagaaatctgttgtcatttgaactggtatttacttataagttttacatcattcctctggctgctttcaaggttttctctttgcttgttttgtatttagcagtttaatagtgaaagccctagcatgagtttccttggttttatcctattgtatgagatttgctcagcttcttgcatgtgtttgttaatgtcttttgccatattttcagtattttcagacattctttcttgaatacattttcactgccattctctcctcttattctaggattccagttatacaaatgttaactcttttgtttttaactcactggttcttgaagctctcttcaagtttttttttttccttttaatctctcttttcttatttgttcaaattaggtaaattcttttgatttccttcaggttcaggaatcctgtcatcttcctgttacccttgaacccatatagcaagtttgagtttgtttcaatggttgtatgtttcagttatttagtttccgtttggatcttttatatatatatatatatatataacttctatttctatgctggggtttctctcattttttttcttgcttgaaagaattcacaattgcttgttgatgcatttttattgtatctggtttaaaatccttgcctgataattccaacatatgattcatatcactgatggcatctgttgatcttcttctttcattcaagttgttattttgatggttcttagtatgacaagtgatttttattatatcctggatgttttgggtatcgtagtatgagactctggatccaaattcatcttctttttttattcagaagctgtccttacattgaggtgtgcacagaggccaggtgggtgtgtatgttcattcatcaccccgttgtcactgccaacatcatccagcagaagtggagcactgactcacactgcagcagatgggtagggtgaaacttcagcttccctgttgaccccttcccagtgaaagcgggccgcctattgctgctgccttgttgcccctcatggtgacatattcctaactccccactgagccacggaagggaaaaattcattgcttgttcacactactttgttgctgcagggtaggggtggaagctgagcttcctgctggtctctgtgacaccaggggaggtggggaatggagtgtcaagtaaccctcctcctatcaccttattctgcctcattgatgccaggtgtgagagaaggttctgcttctctccagaactctcccagttcttgtgaactgggtccaattcacaagaaagggaaaaaggatgtagagtattgattggccctaacacctagcacacagtctcactaataccactgggagtaggggctcagctcccctctaggccctgctcacttagtgagggtggggtgggaacagaatggagactaaccctgacacacaccacctcatgtggtcttgtgctgtgaagagagtggagaggttcattccctccttggtcccactgacaccagaggttggagtaaagtaaagtgctgatgagccctgactctcgtgtccttgtttagtcttgttaatattgggtggatgttgagcttcagctcctgactggggccctgccagagccggggggaatgtaatgtgctgactagtcctgccttgcaccacttcactaagtcttgctgctaccaggtaggggtggtggagatggtttagctacttgctgggctgaggtgacactaacttagtaaagagttggagcatggctgactcctttcagacaggggatgaaagatcagccctctgctcactctgccaatactatttagaaaagagaatcagagtggcacaacttccactgagcagaggacagaaaataagctccttatttggtctcatcaaaaccacccctacctacagttagacagctgcctgtttcaacaagtggagaatggaagatcagctctctgtttggtttattggaaccaccaggcaaggggaattggaacactgactgcttctgccagtgggaatagaaggttagctgcctcttggccctgtcaacaccactgtgaaagggaatcaaaaactactgcttacttctgttgggtgagagggtggggtgaaagattagctccctgatgagctcggctgctggaactatgaatgtgtgtgagtgtgtgtggggagagagtgtgtgtgtgtgtatgggtgtgcttgtgtgtgtgtgtttggtttttccattggagtttggctaaagtatgacaggtactttttgctaaaaaggttttctcttgtaggccaacattttcctgatcttctgtctaggaaaataagcctttccttggagcttattttgtctgtgcctgttggtggttctacgttagatgtttctggatattaaaacaacaacgaaaactagggaatttgccatgttgttcctcaagtcctcagattcctaattttttttcttctacctacttcgcaaagtcatcttacacttatttgttttgttatgttcagggctttttaattatagaaagagaactgggaggaataaggctgctccatctctgtcaggatcagaagtcatgtagtgttataaaaaggactttgtctaccattttaaaatagctgttggctgtaagctccttattgtatttaaagtatattggctaaaattgtgggaggtaaggaaaactctttgtaaagtgaactgacatggtgaaaagagagagaagatatgcttgtcaaatattgcgaagtctattcagatcaagctagacatggtctgtattagtcagggttctccagaagaaaagaaccaataggaggtgcatgtctgtgtgtgtatgaaaaggaatgtattagggagaatttgctcacatcattataaaggcaatgtcccacgacaggctgtcagcaagctatagaatgatagaagccactagtatgtctcccaaggaaggtgatactatgtctcagtccaagtcccaaagcttcaaaaccagggaagctgacagtgcatcccatagtctaaggctgaaagcctgagaacccccagatcccccagagaccactgctgcaagtttcagggtccaaaggctaaagaacctagagtctgatgtctaaaggcaggaggaagaaagggcattctgcactggaagagaaagagagaggcagctcacaaagcaagaaaagcctgcaagctgaatatcccccttcttctgtctgctttactgtagacacacctgcagctgattggatggtacccacctacattgagggtaggtctttctctcagtccactggcttatatgtcaatctcctctggaaacaccgcaatagatacatcaagaaacagtgctttaccagccatctaggtatccctcaatccagtcaaattaatattaaccatcacatggcctattcacaatttaaaaatgtagcataaattgcagcagtggtcaagtgtattggcaagttgtaaagtgcctataagaaacctatacacgagcatttgcagattcccttaacacttttcagcaaatattttgttacaattgaaattaaaaggcagtttgaaattgttcctctactaaatatcacactggatatgaataaaataactagatagactaacaaggtacatactttattgcctgtgattattgcaactaccactcctggtggagagccattcttctcaggtgtgcaagtggaagattaattctcaatcaggaatatagatttgatacaaggaaagcatttcacttggcattagtgtgtcaacatttcagctaatttgcctaaccacaaatacttcagggggaagagaaattgctagtgctttatattaaacattggatggagctggcggagataatacaatttgtactttttttacatagtttcaacgaattttggcagatatgtctttttgaggcaactttagatgttgaaaagctgcttgtggatattcaagacttgtctttttttcatgttacaatgaccatcaccatagtttgtatctgattttttttgtgtgaattgaggaatgtggagtcataatgcaaaagtcattgccataattctttgcagatcttatgactggaaattcttgtgtatgtagtttgatattcatttgtaacacatgtaactggttcgtgtaatgattaaaataataagtaatgcttgatcatggttaaaataaataccaaggataaattcttctattaattagtgtaagcttatcctaattaacatctttaattatgggctgttgttaatttttgtcgcaacctattagatatactgtcctaaatcattaacactagtgtaactgagcataaactctaggtgactcacggctacagtggaagcgcccatggaaaatatatatttctaagtacacagtttagataatttcaagcagaatcagaaaattcttgatgaattctaaatttagtataaacagaaatgtattaggtttggttattgagccaagcttcaaacattgaatatcagaattgtgtccatttgcaatgagtaagcatttgattcaagatttttttttgtactcagactcatttttgtatatctttctgtttaagtcatattgtatttactgcgattacagattttttacatatttcttaaactggttctatgttatgccattatataacaggtgataaggaatgtactgtcactgccccttgacaatgaaaaggggacatctctactagtgtatgtgtatgtagctgtggaggagttgaaacagtgtaagtgaaatgcctagaaattgtcctgagttttgattttgtttgtgcttacatttttattagtatatgtactttcttgaatagataattgatttggggcaatatttctcaatcttggcactactgacattttggactggataattattggttgtgcctggctttcctgtgcattgtaggatgttcagaagaatctctggtctctacccactagatgccagtagcaaacctgccacctctctgcctacttccgtcctgtcttgcaatagtcaaaaatgtctgcagacattgccaagtgtcccctaaggggcatgagccttggtggagagaaacttctttacagtctcatccttggcgatgtcatttccttataatttgcgtagttaaacatttttgttttgaggagcataagttgtgataccatacctgtacagaagaggcttggatttaaggttaaccacatttaactgagagaattttatcaaagcatgaaataagaaaaataggggcaaaaaatgaaattctaaaatggcttatgcaatttctaagggtagctaataagaattctgaattggtgacattgtttttaaaaaaagtaaagcattaaaagaatttcaaagataaaatatattttttggagtgtgaacactgtaattaaggagacccaataatgttaagttacttaaaggatgtatttttacttaaagtaggatacaagttggagaaattaacattcggttgattgttaaatattttgattcaaagaaagaacatagaattgtcagcctcaaaaaatatgcttaagatagaaaaataattttggttgcatgaaaagaaaaagattttagtaaattgttgacttgaaaaggggaactatttgacagaagtctcaacagtgttttggagtggcatagtgattggggggtgacatcagatgattagagttaaaaacgactggaccggctgggcgcggtggctcacgcctgtaatcccagcactttgggaggccgaggcggctggatcacaaggtcaggagagcgagaccatcctggctaacacggtgaaaacccgtctctactaaaaatacaaaaaattagccgggcgtggtggcgggcgcctgtagtcccagctacttgggaggctgaggcaggagaatggcgtgaacccgggaggcggagcttgcagtgagcggagatcgcgccactgcactccagcctgggcgacagagcgagactctgtctcaaaaaaaaaaaaaaaagactggaccagttattaggccttaagttgatgtaaactatatgacaaattgacaatttagagacattgtggggacatttctatgaaacgtctgtttattattcattcctgtgatgattttgaaagggcaaataaaatcataatcacatattgtataatgctttttgtctttcaaatacatatacattaaaaatgacttatataaagcaaaatgtacctttttgtgcacaattctattggtttttgtggatgtatactgttgcataaccaccatccaaccaatacacagaagagttctataacttcagaatattcctttgtgctactcttttatagtcattcccatcttcccatccccaccctctattgacccgtaaactgttttctgaataaatatctgggaaaaggattgctgtgccacatggtaggtgtatgtttaaagtttctcagaagttgacagactttttccacggtggctgtaccattttgccttctcaccagcaaaatgtcagattacagttgttttgcatcctggccagcacttggtatggccacttcatttatttatttagctcttcttctgataggtgtttagtggtatctcattatggttttaatttacacttctctaatgattgatgattttccccggtgactgatgatgattgaggatcttttcaggtgcttatttgcctcccatgtgtgtatcctctttagtgaaatgtttgttcaaatcttcccatttcaaaaaatgttggcccttttcttattatgaaatttctatggctctttatgtcttgtgcatagaagtcctctgtcaaacagatgtctgttttgcaaatattttcctgatttgtagcttgtcttctcaatattttaacagtgtcatttatagatcagaagtttccaattcttcaggtctggctcccctccataatctgtttgctttgattcacttttcagcatcctcatgtagttgctttttgtgtttggtctgagattttacttgtgattggcagggagagataggctgaacgtgactgagtggagtatagcatgagaagacttgcataatattttttttaattttcagtgttttgcaaacattatttttgatccattaataatgttaatgattgccattttatatacgagaaaataaaaaaatcaagagtcataagagtttaagttcataaataataaaaagccacatggaaataaccagtgatctaaatcacctggaacaactaaaaccttaaggtattatatcctagtttgtgtgttccgaccacaagcccctagaatgcaaattacttatgtaccttatttaattatgtttgctttacgtaattttagtactttaggaacttccttgattaaatttcaattcatacatttgctgaaaaataactaattttaaaactaagtaaggttattaagtaacttttttccatctggaggagaattgtttttgttccagattctttactgacacaatagtagcacactcgaataagtgcatagtatgcttcatggaagatcatgtgtaaaagccaggcttagtcaatgtttcttctgataatacatgtgaaaagttgaaaagaacctttatggtcattttcctagtaagcaagtcaattccttttgcttaaagcattttaacttcattaatgtaaaagacaatagatatctactatgtatacaacactttttaagagatcttgaggttacagaagatagtaaagccatggtgtctatccttaagaagctatacataataagaaagaaagaaatctcactgtgatattgagtatacatttttggaaagtaatttttgaataaaatcagatgttttaaaaaatcgtaaaaggttttgaatcaacattttcaaatatttagaaaataaatgagaaaaaagacagacccaaccaattccttccagtaattttgctctgatattaatgtaattcccttcagcttttatgtgcatattatatatgttattaaccatagtacatctttaaaacatatataattttgtctgctcacttttttttaaaaaaacagcattgtatcacagtttattttcatgtaccttcatagttcaaggtacaagggaagtaacagagattccctgagagaagacaatggatgttcctaagaaagacctagtgtgagagttcagggaactgctacactttggattttttttttttttttttttttttttgagacggagtcttgctctgtcatccaggctggagtgcagtggcacgatctcagctcactgcaagctctgcctcttggggtcatgccattctcctgcctcagcctcccgggactacaggcgcctgccaccatgcccggctaatttgttttgtatttttagtagagacagggtttcaccgtgttagtcaggatggtcgggatttcctgaccttgtgatccacctgcctcagcttcccaaagtgctgggattacaggtgtgagccaccacacctggccaggattggttttttaaaataatgtagaatgttttgtatttgtccttgcatcatgtaaagatttatccttaaaagtgcaatttgtctttggactataaactctgcgagggacaggacagtacttacatagcatgttaaaaattcaagtatcaatctacccatttaggtctattggctctttactgagtccagggttttatttacatgtatcactgaatgaatggccttaagaaggtacagatgagactactgaggcatagagagatttaacagaggcaagcagagcatcacaagcagtttggaactcaacacatgtttcttgtttgaaaatatgcacagacaaaagagggatggatagaaagttggttcaatataggattaagacctggaacaaaagcacatgggcaccagcagaatctacttgagaggtcacagcgcccaaggggaaacaaccctaggcaagtcacttaacctcactcaccttagttctcttgttggtaaaatgcagagtttatgcaaactcaatacatgtcaagaaatatctgcaaggcattgtttaaaattgaccctctggatttttttcatgcatgcctggttattatttattaagatgtactaggggcaagtctcaaatggaagaaaaaataaaaggcacatctgcaaagtgaagaagtggggttaagcgcaatgcaacagaaactcttatactaatccaggaggactttacctgtcaatcaaatctatattcattttttttaaagattaataatggtttgttaactgagtaagctggcagatggtaaagtaatgtgatgagatcttggggcatctatgaccagttgatgactgactgaccaatttcaaaagatgctatgaaggatcataaagtttagttccatgtggattttgatgatagttgcatctatatttaaagccttctgtcactggaagcactcttggtgttgtcagactgtctattggactggatgagctgcaacttctcgcaattgaatgtcaataagaccaaagcaattttggttgattcatagcaccagcttaagcatattcacttgcacagattacatttgacagatagttaccttcagctgaactctgtggttagaggcttgggcgtattcttgacagtgagcttagagttgatgtctaatgtttatttcatatcctgtttttaccttccctaatattgcatgtgtaaatctatatttaaatatattcacagctgatgttcttgtcggtccacttgttatctctggacagaatgctgtaatgattcaatttaattattttaataaaaataacttgcacccctccagttttaatttcaataaatctgacgagtaatgattaattttaaggagtcttattgatgagcaattgcaacactataatgcaggaaaatgcccaagtggtgggagcatgcttacatctatagtaaacttaaaaccttcaaaatttggtgtgtgattatgaacaccgaggaaatatatccacatttatttaccaaattattattcctgtatcttttttaagttatttaggtccatcagttatcttcaaagtttaggtttgaaactatccatttcaagaatattagccttttaagatgattataatttaaataacatattctaaaatgttttaattgaacagtagaatgcatgtaacccaaaacattataaaatttaaaaagtcacggccatttttgaatatttagattgggaaaacacttaagatgtggttttatgttcaagaagaggtgcaattatggtatggattcattcatcattatggtattgtattgtcaacttttcagttatgttcaatttttaagatgctgggtgggaaatttaagggacatatagatctaataatctgagcctaaatctcctgctctatacaaataactctgcaaagctttggaatccctttatttgactaggtgaatggcagttttgtttgcatcagcctaaacctagcttggaaatcatgattttaaagcaaacacgttttcctcacacatttccatatttcctagaatctatggttttaagatatcaaacaattcaaattatgtagttatacatttcacacaggacaaaaactcatgctgaagtaggtaaaatatttttcaaaattattttctctacatttactggcatactttctctttcttactgtcttttaaaactgacagtcagttttttttatttttctcttttactgacagctagtaaatgtactgacagttcagaagcaagatgtaaatgtaagtcactattattttgttcacctgatacctgagcattagtagaaatgcatggctatattttaaaataaaaactagattatttccaatggttctgaagggaagatgtatagaaaaactgtcctctgtaaataaaaatgtgtttgaggcaagattgcattacatttagaaatagcatactttcctcattaggatgtgattggtatttgtactgaagaaaatgggctaattatttaagtaagatgtatatttactttctgtttcattagctgtaaatctttatagcatataaatctcctttagaaattaatgggaagtatataagtgagggaaagaaagcaggttatgaagttaataaataccatgttaaaaattagtttctacttaaatataaagttcaagattaaaaattaaaaattgttttattttaattagaaaaatcttgcttagttaatttctctggaagaaatgctatataagcagttaaatgtggagaattatattctattgataaaagtatgttgggccagactgaaccaacaacatcatagaaggactgattccttacttcctttaaaaagtgatctgtcatttgtctacattataaataacagctgagttttaaaacacaaggagatttttaaaaagtggcagcatttatttatttactgcttagacagtattcacagtattttatttcatccttaagactctttttttgttttgctcccacattattgttacacatatgggaattggtaaagtgggaaaacttagcatttatagatttttatactgaagcatgcgatgataaagtagtcactttcatccaagaaccttttcctcttttcacttacactagctcttccagaaatggcccctttagtgcctttaatggttttattctccttctgtcactatttttaatattcttattcttatactgccatcatatataactttgtgaaaatttgtcatataaggttaaaattgatttgcctttaaatacagtagtttccattttctgttaactgtttgaagaacacctattgagaggcaaggaaagacctgcgggataagttacaaaaggcaagaattcctcacagaaaaagcagcaggagcttccttgtcaagagcttcagcaagtagtgtcagcagcttagaagttgctattggactgctgagtgttatgcagataaattgtggctctagcttgtcctccgatgtcattctttgatttttctctgttaacactgcatttgcatttgggtctcactgagaacaaggaccagtgcaaatgccttatggcatgtgtagaaagctgcttttatgttaaaagtgatatgttttcttgttcactgtgttcacaacaaaaattcatcttccgagtcttggaattcccttatgtatttgtaattttccttccaagtcataatattcatatacaaagagtggaaatttttctttaaaaaaacctaccaaacaacaaaaacagtaaagttagttggttactagcagcaacaactgaaaagcagcatcaccaaaacatatgcaattcatgggtttccagcaaaagaggaaatctggaaagagaagatccttaagtattgctttaaagtgagcactgaaggacagccgttaaaacaatcccaatttttagaaaaggtattattccctgacatttacttgttttattcccttctcaatctgaagacacattttggacagatgctcttgtcttacatgaacattcaattcatttgagaaaataatggttatacttaaactcgtgaagtgaaatgtatggaagtctgttgctttataactttaaatagccatgtaacttgttcatggcagaatatagtcaagtcctgggcaaggactttttttctcttctccaataatgctattcaaggggaagctagttattgtgtgacacatgcttgattctcaggaggtttggacaaaagagagggttagaaggtcaggagagcctgacgctattcaactagatatttgagtagaattcccacaccagaattttgcctcatacctaattcagacagtgtaataatgggggaagggcagagagagggagggcagatggaggtgtcctttcaggttaaatgttaaaataagggtcttcatttctgtctctggtggcacagagcattaaaaaccctgtgacacattttggaagtgttgctataaaatagattttaacgtttgaggatctataaagggtattattgagtacttaatagattctgtgtttgcctactgaaatcactacaccgccgatatatacctcattaatttgtaaagcagtttggcccaacttgagacaatgtactgtattaaagcaaagtctatatcccaaattttcatggctaataattacaaaacgttcagcatctgaagaaaattatctaaatgtgacaatattggtcttggatagtttaacttgcgtgaaatatttcacacagaaacatttgatctatattgaagagttgtttcttttttcatcagatcagctatatcacagtaaattgtggaaatagaaaatggaaactaaattgttgaaaatgcatctgatagtttgtttttattgccaaaatgtcattgtccttgaggtccatcactttgtagcttagtaaaaacagatttaggcattgcaagtgagaagtcattgactgttttccttgtaaccaatttatttatcaagttggtaagtttcagaagtatttccagtgttcagcctatttcttcacttttctattttccaaattatatcctattacttcaaagatgtataaagttcacacattctggattctttatctcttttattgttttctgcttcatacaaagtaattaaattatgttcttgaagtaattcctcctatcttacttaaaatcaccttcatgatctgtcaagagttttcaagttgttctgtgataaagttcttagagtttgagaagctaaatggtggagttggtgcttaagctcttcactgaaagctgcaagagtataaacgaagtcagaaattactattattattatttttttctcattgagacggagtctcactctgtcgcccaggctggattgcagtggcgtgatctcagctcacggcaagctccgcctcccgggttcgctccattatcctgcctcagcctcccgagtggctgggactacaggtgcccgtcaccacgccaggctaattttttgtatttttagtagagacggggtttcactgtgttagccaggatggtctcgatctcctgaccttgtgatctgcctacctcagcctcccaaagtcccaaagtgctgagattacaggcatgagacaccacacccagcatatatatatatatatatatatatagttttttggtttttgttttttgtttgtttgtttgtttgtttgtttgtttgtttttttgagacgagtctcgctctgtcgcccaggctggagtgcagtggcaggatctcggctcactgcaagctctgcctcccgggttcatgcctcagcctcccgagtagcttggactacaggcgcccgccaccacgaccagcaaattttttgtatttttagtagagatggggtttcaccgtgttagccaggatggtctcaatctcctgaccttgtgatccgcctgccttagcctcccaaagtgctgggattacaggcatgagccactgcacccggcctgaaatgactattctttttaataacttctatttattgttttgtgttattcataattgttgtgcaatttaatttatttcactagtagaacactatgtacaggactgtactgtgtggaggttttagaagtgacaaaaccagttaactaggctcttggtccaaaggaatttagtgaaagagataagacataaacactaatgactgtaacatttatggaataataaataggagctgctgaaagttgtgatttcttctcattatgatagtgcttcttggattataaaaaatttaacctagaacatgaggtttcaagaggcagagatggggagagaagaattccaggtttgggactaggatgtagaaaggcagaaaggtgaaaatattcttgtgatgatggcaaacagtgactggtcaagtttgccaagagtaggttttatgcaagagcgtagtaagatgaaaccctgaaggaattttactgtcagatgatagaaaccggaataaagctgaggatacagttcaataatcaaagggaaccaaatgaaagttttgagcaaagaagggatcttattaaaacagccttttattatttcttttaagctagaggtagcttggcattatctgtgccagctcagagtgaccttcaccccaaaattctagttggattatggagcagttaatcttacaggctctaataattctgtcaccctttgttgtcattctatatctgtgtcccttcagttatgtgtcttctcccatattctcataccattatttctctgtctttcatttctttactttcatcatccacatcaggacaatgtttttattctatagtagtttgtaaacatgtcacattctttagactttcaagctctttgtcaacagtttttcaaagtccttgccttacataaacactaattctttccctttagggacccctttcctggcccttccaagcaaagggtgctcattcatccactcctcatgcacctcattgctgggagcaagtagagatgtagggattgctttcttctttttcttttacctcatattggaaagagatgtttcctttaaagctcatgttaagttgttgtgtacctttcttcaatttttgcatcaatttttgcaaaccttgcatcaatttttgcagctgctgacaccttggataccccagccacctgcctgccagatacaatgaaaaatttcacctctgactcacagtgtttctctgcatcattatcagcttttggttaatgaccatgaagcttcactttttcacctcttgaaaacttttggctacagaatgaagttaagcgcctaggtgcttatattgtctttgagtctgttgggttccttctaggttcagtttcttcacttctagcctagcccacaaggaaaatatctttagtagtcttttaaccattttcttttatttcattttttttcattctgttgccaccagacacctattctcaaatcattcacctgactgccttcttaattcctgtgtatagattgcagaatattactgaaaaaaaacaggtgtgtggattgaggccactaaaaattaatgatttccaactagagatggacccttagtgcagccttagggtaaatttcagaggtgcagctgattcaaagggtgtgcacaatttcaggggtatattgacctactgtcttcagaaaatgtttgactagtgcagactcctaccgaaagagaatcagagtgcctattcctcaaattattgttaatataaggaattatcttttctcatttttttctaattttatgggcaaaatagtatgagtgtattcttatttcatttagcatttcttcccctacctcgtacttatcttaccttacataggcttattagccagccacatgtattttttgcttctgggtaatagctgtgtattgttctcttatttttttaaataaaggggtctgcatttttattaatgactaagaaatcttgatatatttagaaattatatgtaaaaataattttaaattttttttattctactttaagttctggggtacacatgcagaacttgcaggtttatgtcatagttataaaaaaagaaagaaagcataggcagagaaggaaaatcactctggacagaaaaaaataattggttaaaatattaaagaataaaatttgtaggtaaaaataataaattttaaaatgacagtttaaaaatttatatgtaggctgggtgtggtgccccatgccgatagtcccagcactttgggaggcctacgcaggaggatcacttgagtccaggatttcaaggccaggttgggcaacatagcaagacgtcatctctacaaaaaaaaaaaaaaagaaagaaagaaagaaagaaaaaaaattagccaggcatggtggtgcatgcctgtagtcccagctactcagaaggctaagatgggaagatcttctgagcctgggaggtcaaggctgtgagccatggtcgtgccactgcactccagcctaggcaacagagccagatcctctcgcaaaacaaacaaacaaacaaattacatgtgaaaagaattatacgtgaagataataatttcagacatacaatcctatgttaactcccatagaaaattaagggagttatcacacctttgcttttaacaattctttctcttcccacattccagttttgttgaaataagcagagcttcttatcccagcttattgtagcaaaatcattatagtaaaatgatatttttatttcaagcattacaatagcactttataacttatttaaaaatttatatgatgttaaaaggattcaatactcattgagtatcctttcataacatacatctctaatttcttaatttgaattgagctttctatttggtgagagtatttctattctgaaaaggaacatggccagtgatgtaccttctgaatctttgcgtagttgagcctgtctttctaatgcctgtacccatgaacaatgtctggatgatgatggatttttttttcttataccctttcgtttgtgagcttttaatacattgcatcgtgtttctgaagagaaatctgagacaagcttaaggattatttttcactgtgggtgacccgtttttgtgtgcctgagtgagattcttacaggtttctttctttatccttaaaatcccaggactaccagcctatagtttggtgttaattaatctttgttttcttgagaatatggtaagcttttcttagctgaatattcaggtcatatttttaatcccttaattttggtttctatcatgtctttgagtttatattttcattatttgttttcttcgggctttcatcctgtgaaatttagtgaccaatatagttttattccttttatgtccaagatacataagaagttgtatgtactctagtgtccattcgttcatcaacttattccaattaccccaaacccctatttccaagggcttttcttcttccgttcagactctttatttgggtcttttcgtggttccttgcttaacactatgcacttttcacggcacacactttccctgggaattcttactcacaaccatgactcctagtactattttcatatgcatagttataaaacctgtaatttctaaatttatattgccacagtgctatcagtgagctttcaaaattcaaattcaagtatgatttttcttagttttaagatttcttcagttggaatggagacccttaatgacttagctctgacaactgttcagcctcatgttctgtaaggtctcctctgggacctcacattctagtaacactgagctgtctagtctttaattgtatccatctttcttatgttgctacaactgcacatgttctttaccaagaatactctcccttactatttattccgcttaatcctactttttcctttcactcatttggcatcaacattttcaggaagccttttcttatctcaaaatctgagtagacatgcactcatcctttctatgaaattatcgcaatttactcaatgtgctttatttgtgtccatcactagactccagaacttttagatcaagaattttaccttatttagtgttgttcccttcagggctcggcatcatgtttgaatgtgatccattctcaataaacaaagtttgattgaatgagtgatggcatcatccagtattagaacaaagttgataggacagtttgtttagaagctcttgcaagaatacagttgacccatgaactacaaggaattgaattgcccaggtctgcttttatgtgaattttttcgagctaaacacagattgaaaatacagtacttgcaggatgtaaaatccgactatgcacagggccgactttttgtatccctgggctccgcaaggctaactgcgagacttgggtatgattagattttggttatttatgcctggatcctggaaccaatcccttgaagactgtacagatgagagatattagttgatcgaatatgtagcaggagaaaactgaaaaaggaaaagaaatttatgaagtaaattaatgagaccgctgcatttcattactactttggagattagaggaacaataaaggtgactttaaaattttgaaccaacttctttataacatggcttacaagtggtagctagaaagaggagggttggttacttttgctttgtatattgcaatacatttctgattgttccctttccacttttccccctagtattgttgattactttgtctttgtaaaaaacttcatcgtgaaaatttctttctaaaatgtaaatgtgattacctccttcctctccttaaataaacactatgctcacgattgctcacactccagagaatgaaatttccttcccttagcaacatgttcaagatccttcaaaatttgttagatggtgcctctatagcttcattgtccttctatgtactttgagttttaaccatgatatttttttgcctcccaaaatcatgtactttgtggttttcatgcaagctcttcctgtttgccttattcagttgcttctagcttgtacacttttccctctccctcttcaactccatttctttgtgtacgtatctcaatgaccaccacaaatacaacttcctctgtaaaacacactaatttcttctctccttttctcctctctgctcctatagcacttttttttcttattggctgtatgacatttattacataggcatattttattagatattaagtaggttttgcattaggtatatttttgaatgtactgaaaggcagatactttattcattcatatgtgctcagaagagcaaaatatctcttacataatgtatgtttaatataagtaaatatacaaacaaatagaaatattgagtttggtaaaagatgatattgagaaaaagtgatatgtgatagaatgaaaagctacatatattttctaaatgatgggtggacatttacaactttgctaaattatatattaaatcatctctttatcctgaaaaaattatcttttccatgattagtaagtactttacagtctcttctaggttataaagctcagtactctaattagttttagaaaaactgtgactaaactagcagtactgttttttctcccatattttgtctcacactgaagtcagtgatatttttttctgttcacagatatattcactcttagccttccctgagctctattacagcctggaaaataactggaatttcctttaaaataatacacattttcttaacttatcatattaaatgaaaaacacacaaacactggcctcctttcacattccctagaactttttgttttttctgtatttggcatttctgatgtctttaattttttgtgattctggctctgtattctggtgcctggaacagtgttgcttccaaataaataggcagtagtgatagcaatactcataaatattttaagctatttggaaaaagatattttttagaagctgtgttttgaatgaccttcccatttaactacagtgaatttcattcttagttccttcccaatatctaccctcttgcatcttcttttatgttgtttctaacgtcttttgcggtacctatcaatttactgtcatctactgttttcattaagattgctacttgtagatcattaataaaaaggtgaaataaaactaaattccttatcaattctctccttaagtcaataagtatccagttttaaatgacagtgcttgaattcaagttcatattaaatgttacttcaaataagtttgggagtttacacatacatggctctttggttcaattacatttgtcttatttattttgttttctgttcccttgtagtattctttgataaacttgtcctttaaaatatatattccaactaaactctgcttagggcctaagtggtgtagccctctggggagggtcgcaaatgtaatttgtttgattggatactcaagcttttcaattgttttcttttccttagagaaatagaacctttctagctttcaggtcaattgatgtaatggttggattcagatggaatgacactttctccccattgtaagtctctagttcctcagagaaatccttgggaaatctgttgacaacttgctgtcatccagctgttctgatggtataaatgacttagacactgattcctggtagtttaaaagtctaatggaacagtgaaattttgagatctcaagtgcatcatgaataaagcacttaagtagcacttgtatatacttcttacaatttgttaactggttttctgctttttttttttgctggagaaagagatttacagttttaatctgattagacattagcagctggttgaagatgctattactgtgaagtatggaaaagaacacaatcatgatgaaaactttttactcaaatccttagaagaagaaagcagatgaaattagattggcaaaggaaaccagcccaaattacacacaggagagaaatgtagcagaggagagtactgagttggtgctgcacgcatagagcttacagcctccatgggcaggggacatgtgggtgtgactgccagggacaggaattgcaaacagcatttggagtgacagtctgggtcagcttctcatgctctttcccatcaccaggcatcagcgagtggaaagatttgacctgattttggagcacagagtgtgggctctaaggccacaggaaggcaggtgaatgggactaggatgtagtggagtccccatggctaaaaaataagttgtattgcatacctgcctttgccccacaattatcaaatccaatctagggtgaatagaaacacatctgcagacagatccaatgtccacctacaaaaagtttcagaaaatgaaaacagatggagaaaaaaaattataaaaatataaagaattctggtaaagttgccaaaagaaatgagtcttctagtcaaatgggctttgttctattagtagatgttgagacgaatgcagtgaattgattagagctgatgttatttgtttgggtgcatacatgtgtgcctggtgaggggtgggtgagggaagaaaaaaaactcaaacaaataagaaacatattgagagaaaaataatacctagagaattaaaatagtacactataacaaagtttgtgagtgattattaaggcttgtgtgggtattcgggggctctctgaggtgtcaatatgtaaactgagatctgacagtaaagactcagctaccttatatctcttcatccctacatcttgttctaagaaaacatcagaagtcctgtgatctcagcataagttgaaaactcgtaagtagtcattcaaaggtggatttgtggagggtagaggtaaactaccttgattatatttacatagaatggaagtgatgctaatttagaaatgtccattgctgtaagtcttaggagatgtaaagtaccaatgaaagatcctgaacagtattatgtgacagaaaatgagcgttacacttttaaaaaaatattagatgttgtaactttagtcattctcacctttaccttttaagtatttcaccatttaatatcaaccttcattattgatttatttctaaagatatctggaaatagtttaggctcattaattttctttttaagagtcaaatcggcatgcaaatgtttctcccaccaagaaatttttttcctggacttcaccttctgaggcatgtccacctttgaggcaagctaagccaggctttgtgaaggcagaaccatccgaagcacacagccccaccaaatttctctccctccttccctccctcccctgttcctctctccttctctttcttttttctctttctttctctttctttctctttctttcttccttccttcctttctttctttccttctttctttctttctttctttctttctttctttctttctttctttctttctttctttctttttatttctttccttctctttctttctttttatttctttccttctctttctttctttcttttttttttctttctctttcttctctcttcccccctcccctgctctcccctgctctcccctccccttccctttctttcagctgctgcttacctggggtaacatggtttgggaagaaacatgtcagaattggagtgaataaatataaatgataaaaagacaaaatgaatattattttcaagagtaattaccagtatgaagttcttcagatgataacaaaaactattgacttattttgtctaaatcaatgccactatcttatctgtgtgattgtgaagggaggaaaggaaactgttcactgaatattctgcatttgacccgtaaatacctacttttgtattcagggatgatatattcttaccttaaattaatgactgttttctactgttcttttttggtgcaaacaaattaaatgtgtgcacttctccatgactgattgtgcaaaaactgcttagacaattactatctctctagcttttgatcagaaaggactaccttgaaacaatggccacaataatggtattattctcaattctagaatttatttaaacaaacaattcaaatcatatttcataatacagttctctgaaggagcttaaagagattcagatttttccttttgtttaacatggctcttcatttagtttttgaggcatatttttaataaattttgctcagtactgtctactggagctgaaaaaatctaagaagacacaaaatggctgaagcataggtacttacagaaaagcatgcctttcttttaagaatataaaattaatacattatttatttattatataatgggatgttctacccttgttgaagattttagcagatataactcatgcacagtgtaagtgagcattcacccctgttttgtttatatggcaggactatttctacaaattttacaaattactgtttaggatctttatgacatccattgagtgctggcatgataaatgattttctatatatctgtctacatattgagggcctgattgatggcccttctgacttggggtcagcagtgagttcacatctcttggtatactttggcttattccctggaagtataaacagaaatccaatgaccactattttcattattttccttcaggcataatctgacctaatgatatgtaactgtattactgtgatttaagagatttttaaaaaactataaacattttgaggaaaagtgaaaatggtgattttaaatttaacacatttaaatattcattttatgaaaagaatatttgaaagaatagggatttatcaggatcaatagaaggcttggagtaacctaatcattttaaattttattccttcttgtttttttctgttttcccacaacttattcactaccctctatattctcatactttgctaaatcatattaatccttcaagagttggtttagatgaagcttcattcatttgataaagattaaatgagtgtccagtagttgctagctcaccttgttctgttgtgcttcacagacaatgtgttttatttttatttttattttatttttttacaaagtgaaggtttatggcaaccttgcttcaggcaaacatgtcatatattagtgctatttttccaacagcatgtgctcgttttgtgtatgcttcacattttggcaattctcacagaaatttaaatttttttccaatcattatagctgttatggtggtctgtgatcagtgatttttgatgttattataatttcagggggtgccatgaaccacaccaatatgatatggcaaagttaaccaataaatgttgtgtgtgttatgacttctccaccgacagaatgttcttctgacttgttccttctccttgggcctccctgttccctgagacacaacaatattgaaattaaattagaccgagtaataaccctacagtggcctctcagtgttcaagtgaaaggaagagtaacatttctctcacttgaaatcaaaagctagaaatgagtaagcttagtgaggaaggcatgtagaaagttgacaggttgaaagctagtcctcttgcaccaaacagccaagttgaatgcaaaggaaaatttcttgagggaaaattaaagtgctactctaatgaccacaaaaatgataaaaactgaaacagctttattgctgatgtggagaaaatttgagtggtctggatagaagatcagaccagctacaatattctcttaaaccaaagtctaatccagacaaggccctaactattccattatgtgaaggctgagagaagtgagcaagctacaaaagaaaagttggaagctagcagagattggttcacaaggtttaaggaaagaagtagtttccataacataaaagtgcaaggttgaaagagcaagtgctgttgtagaagttgcaagttatccagaagatctagataagatcactgatgaaggtggctacactaaacaacataatttcaatgtggatgaaaaagtcttctgttggaagaagatgccacctaggactttcatagctagagaagagaaatcaatgcctagtttcaaagctccaaaaataagactgagtctcttgttaggggctaatgcagttggggactttactgcacaggtggtaggtgccctaacccccatattgttaaagggtcaatggtttatagaaataatatagaagtaagtgtgtgattctatctaatctatctatctagtagtatctgtctatattcatattccctatatatccatagtccctacagccatccactgaggggagagagtgggcctgggagtagtaacactgaaatagcacgaatctacttagcaccgaatctttgttcctaaagaccactcatctcttagaggaaccaggattccttggagaaatggctgattccagggctgtggtggggaagtacaaaatgagcctagaacatcttgtgtcataaagtaagaagatacttaaagaattattagaacatgtcaatatgatccagaatgcagctgtatggggtctatactgtccaaacctggaacaacttgagcactgaaatacatattgagagtaattaattatatcccactgagtaaaatagagactcatgagtctatatagataaaaataagcctaagcatatattgaatttttaataagcaataggatatttatacagtcttgaagtatctgctcgcaaaatgtttgctaattgcaaaggggaaaattgtatttttacagtgtggaagcctggcagatatattaatgcaaatgattaaagttaacatcattaataatggaacaaatagaaatgatgtaagacatgataagatataatatgatcactgtatcacctgaatttaatcatgaggaaaaattagacaaacccaaattgagaggcaatctacaaaataactgggcggtcctctttaacagtattaagatcagaaaagccaaggaaagattgaagaactctttttttttttgggtcggcactgcttttttattttattttattattattatactttaagttttagggtacatgtgcacaatgtgcaggcttgttacatatgtatacacgtgccatgttggtgtgctgcacccatcaactcatgatttagcattaggtatatctctcaatgctatccctcccccctccccccaccccacaaaagtccccagtgtgtgatgttccccttcctgtgtccatgcgttctcattgttcaattcccacctatgagtgagaacatgcagtgtttggttttttgtccttgcgatagtttgctgagaatgatggtttccagtttcatccacgttcctacaaaggacatgaactcatcagtttttatggctgcatagtattccatggtgtatatgtgccacattttcttaatccagtctatcggtgttggacatttgggttggttctaaatctttgctattgtgaatagggccgcaataaacatacgtgtctctttcagatcaaaagaaaacttagagtcatgacaactaaaggcaacatgtgatttggggctggaggtgttttttctataaaagactttttggggtcattgacaaaacttgaatgggctttaaagataaaatggtaatgatatacgaataactttgatgtttacatcgtgcttatgtaaaagaatgtctttttgtagcaaatacacgttgcggtattcagggggaatgggtcattaggtcaaaaatttaatctcaaatgggtcagaaaaaattctttgtactactcttgtgactttcctgtaacgttgagatagttattttttaaagtaataaaaaacagaaactactgattgagctgcattacagatagaatgggaaaagagaaaatggacagaggaagtacaaacaacttacttgaggaacacctcaatagagagaagaagagtaacagggaaatatttggtggaggagacttccaagatattttcacgttctcatctttgttcctaaccactttattcatatttatttattatattgcctcctttcattgaaagtattttatacgccatttctattacagattgtaaattccttgaagaaaaggtctgtgctttatataccccttatgtgtagtatatgtagcatcacacttagcatatcataatgtgcttgtttcatattcaaacaacaggaccattttcaaacaagtgattggattttagtgagagtatgaagagcagttttctttataaacatgggagacaaaagaggttgactcacttttaaggagaggacattgtagttataacaagtaacttctagctcattgggatgtaacatgctgaaaaagttttctaaggtattttacagctaacttgataatcttttggaaatcatctgttctccatgagtaaaatagaaaaaggcacaatgatatattgaaataattaagagtatctaatattgtgatgaagtgtgcaccaaaagctttcttaaatgtagaagtgtacatgacacctctttaagcagtatctacaaaaaaccagctggaactctccctattccttaggaattcaataaatcagactgttggcagattttccatcatgtatatgtgtaaattaatagcttttttttggcagtagagagaagagagtaatctaaatgtgtaggaagaagaggccatgagagtttcacatccagtcaagataggacaaaaaaaaatctacttgcattcctatgttaaatttttaaagatcaattaaatggagacttgtttggtggaggttgcagtatatgaagagctttaatagagatgaggggagaacagcaaatccagagaatcatacccagggcacaaatgtaatacacgtaggctttttctgtagattgcttcaagagcctggcttggcttgtctgagttactcagagaggaaaaaatgaaagtgagtgtatatgttggtttggggtgtgtgaaggtgtgggaatggagagaagtggacagagggaaaatgtgttgaaataaaacaccaggagctcatggaaaatgcaaaacagaaacaaaaccaagaaaaaatctttgaggggcatacctgtgtatgaattcatttttccatagcacctttaacatagtcaaaacaaataaaatttaagcagttattcagtcaaactagtagcaggtgcacacacacattccaaacattacaaatatttgtgggccacccacctggttaatttctgccaaagcaactatccctgaataatttcctcaagtacttattcatattgtttgtataaacgtcactcaatagagaatatttaataaactggagcatttataattatataaaaattcatgtcagtaaacaaggccactctgaaaagttatgtgaagaatcacagtatgacacattttgttagaaaacggtgccttttctttattgcttagagttgtaacatcacatagttcatgttgttgttttcattttcggggtatcaattagttgatcaatcagttagtgtttattaagcttctgtccagcaggtaaagcatgctcatcaaatttgcaaatgacataaatgttagagggatggtaaaggcactgcatgacagacatagcatccaaaaagattttgacagctcggagcaataggctgaatctaacaagatgaaatataacatagataaatataaatgcctacctttgggtccacaaagccaactgtacatgtatagcattgagtagatgtgaattagctgttgatgtaagcaggaaaaaaaagacagtattttagttaatagtcagctcaacttaatttatcagttttagctgcatgatgtcattgccaaaaatctagcctgcaattttgaattgtattaaggtgacaatcctgtaccagtttgacaggtcagaccacatctagagattgtagtatttctggagccacattttaagaagagagacactaaaaactatgtcatatttagaacatcacagaaactaaacacatttatcctgaagaagacttaggagaggaatgacatccttctttacatttatgtaagctctcacatggaaaagggattaaatttgtttggtgcagtctcaataattagaactggaacttgtgaactgaagttataaggagatacctttgggttcaatcatttataataattacatataatagtaaaagctgttcagagagaaaggcgttcccaaaatctgcagaggcagaatactagcacagtttagcctgagtgtcctcctttgcaaagtggggacaacaccattgtgaagcagcgatctgggaaggcagtgggatgatatagggaaaatgttcagcacaatgaggggcatgtagtaagtaagtggttatagtacacaggggatgtcacctttcctattgtgggaggtggtgacaccaatcctgaatcatcactgggtagaggtatagaagagatgctaaatggatggatttgacaaactgactgttacttcaaaaccctaactgactgcaacttattaattaaatttgccatttaaaactgtctctgaaaccaccagtcacgcttctatagcaccttgagtatttttttttttttttttttttttttgagacagagtctggctctgttccccaagctggagtgcagtggcgcgatctcggctcaccacaacctccgcctcccgggtttagcaactctctgcttcagcctcccgagtagcccggattacaggctcgtgccaccatacccagctaatttttgtatttttagcagggacagggtttcaccatcttggccaggctggttttgaactctttacctctttacctacctcgtgatccacttacctctgcctcccaaactgctaggaatacaggcgtgagccaccgcaccaagctattctttttttcttttttttctttttttggatagagtctcactctgtcgcccaggctggagtgcagtggcgtgatgtcggctcaccgcaacctccacctccccggttcaagtaattatcctgcctcagcctcccaagtagctgtaattacaggaatgcaccaccacaactggctaatttttttgtatttttagtagagacggagtttcgccatgttggccaggctggtctagaacttttcacctcaagtgatccgcccacctcggcctcccaaagtgctgggattacaggcacgcgccattgtgcctggccaaatttttgttttcaatcctctgtgcttatttttaattatctttaaaatggagaaaaaggtaaacctgccttaggtaactgtaaagttaaaaagaatgaatatgcataaatattttagaacaatgtctgacatactttttttttttttttttttttggcagagtctcactctgtcacccaggctgtagtgcaatggcgccatcttggctcactgcaacctctgcctcccgggttcaaaagattctcccgcctcagcctcccgagtagctgggactacaggtgtgtgccaccacacccagctaatttttgtatatatatatattttttaagtacagacggggtttcactatgttggccaggctggtctcaaactcctgacctcatgatctgcctgcctcagcctcccaaagttctaggattagaggtgtgagcctccatgcccggcccatactagctttttaatatatgttaactacttttgtaatgccaaagtaggtggcaaaggattattggagaagagaggacttgagatgtgtgttttgaaaaatactaaaaatttagttaagtgcctatatggaaatagcttgaacacatcatgagattaagtggtgtgtgatcgtcagacagtgaggagactttaccagttagattggaggtcggctgttggtgaaggttagaaataaattgggtgagatgagtgaggaaaaatctcagaaggccttaggtttaggatggtaagcaataggatgggatgtgtggggattccacgtgttcgtaggtaggggaatacaacatacatgtgatttttaaaataaacttatagagttttcaggatacattgccttactttagcttaaaaattatggatggaatagtggaatctttttatgcaaatccttctttcacttagaaatagaaatttctatttcagggcaatttctatttcagaaagtccaagacttttctcctccataaagttttctcttctgattcatattacagtggttttctttttgtttgaatttcttagcattcaaaatgatgttccttatatttgtatcatccatcatgatcttttaaggggaaatttaaatttaagatacgttgtcaaatcgcttaatgttaatctattagaaaggtgttattctgaatgcataaaatggttttgctttaaatgaggccctccaaattaataaaactgctcttcctgggaagcttctaagttggttctgggaaagcaagtcacacagagaaggtccaaaaatacgttatacaccacatatattaacaaattaagacataatttctcaaagcaactccttggaaaagataatccttcttgactgcattaagattcagtatttaagttagaaacaaccatcatcatttatagtgattcaaacactatctagcatattaaaatgtattttgttgtcatcatacatacaagctccttgagagaaaggatcatgacttaactcttgttggtgtagctcatagggccactgtgggtaccgagttgatgctttatgaattcagtttaaattagaagaatgtaggcaatgggattaccatttgtccagtaacaaattcagcacaggtattctgtctctctatttcccagcctgagtcagcagtttcttttagttctgatggccagcaggagtaaaatagcagcaaagatctggcatttcagtggcacaggtgattgtggaaaattactataatctaggtggactcgattctattttccccttgctaggtactgagatattgtgtaactttctggacttttgaattatacttctcactaatctagcatgagaatgggtggatagtgtcaagaattctacttaaaaaaaaaaaaatctagtgtactcttgtactcaaagggatgagtacaatctatcacagggacacaaatgtgaccaaaaaagtggttaaaataaaatatgaaactgaagagaatgaagatttgagcatgaccttctctgtatcttctttccaaagtgttttcggatctcttatgaaggggatttaaaggcttttctacaactgctactgcttttgtcaattcattcattcaagacacaccaataaacatgcacgagctcctcttgtcctcatagggctagagaatgagataggtgcaaagtttattttagcagaaggctttcttttcacaaatcagaaattccattgtatgtattcccttaaataactggcaaggggaccatcggaatgagctatggcaaaaatccacctcagtctttacagcttcagggtgatggggccccagatcagaattgtaaaatagtttagagaatcttggaacataaaacatggtgcagaaaaaccaaggaagatttaatcttatgtatggaaaggtggttggtagtggagggggcaatggaagagagtggcttgggatcatcattaatcattatttaagtacctataaagtgaaaatatccttctggaattcactgcaagtgacactgaattcttctactaagcaaatatgtgatgagttgataaaaaagaaggtcctgaactcttgacaacagatataatacagtgaatacagaaaatcaaaaacatgctttctatctgactcaaaataaaggtgcacttaaacttgtaaaagacaacatttttatttgaatgatatgacagaagtgtcacgggagtgttacctgctataaagaaagcctaagaattattacctttattagaccagtgacactgagctttagccatacatttctaacttctgtccctctacagagacaattttcttttcttaaataaactgtcatgctagtgttaatatattgttggctctctcatgctctgagaatactgctgatataaaacatgtatatgttagattggtaatagtatctttagtgtagctgactagaacaaatgtgtttccctcatggctgtgctaatgtgataaaggaaaattggctgttcatcagcttttggctgggtaaagacagtagagatggaaccacattcttttttatgcattaataccactgagaacttttcactagttatatttcatgtgcctgcatgttgtgcaaagatgttgtaaaacatgagataatgctacaaataacaaagtagaaaagcctgtatcttttataatgataacagtcaaacaccaaatgacagtaacaggctgtaaaaaatgggatgcaaaaaaaatgcagccctactacccaacaaagcggaatatatccaggcccttgaggacttggtatatgatttgaggtatattaaagctttgttttaaaattaaatcaaatgcaacactagatcaatggatttaagaaagaacatagtttaaatgaaagtagggtggttagaatggagaaaagccattgtgggtaacttcttgaaataatccgtattaccaagtaattattgtagtaacttcctgttttttttgttttgttgtgttttgcttgtttttttggggggggacattgaaaaagatttttaaggcaatagtacacatgattttaagatgtttgagaataaatgtttatcttcattaattattgcaagtctttttaacataaaagcattaaaagtataaccagtttcaggctcacagcaaaactgagtggaaatttcagagatctcccaaacatgctgtacccccatgtacccacagcctccccctctattaaagccctgcaccagagtggtatatttgttacaattgccggacctacactgatacatcattaccactcaaagtccatagcagaatagcatgttgaatgttttgctatcattttaattaaaatgttaacatccaacctttcctttgcatgaccttaaatctcactctttcctcccctctctcaacccctcccctttccagagccttttatttgccatttcagctccttcactaattagagtaccaattattcctttttcatttaagctaaaagcacttgaacaaaaagactatttgcagagatgaagttgatgtccaaacagctgattagtttatttagaagtgtatgcaattaaaaattttgtgcaggtatctatgggtgttttccataaaagtttgatagcattggctattctgggctccagtcgcataaacaaaaatcccatagctttttaatcatgtaatccaagagttatcaagctacaacctgtgggtcaaattggctggccacctgtttttataaataaagttttatttggacacagccatgcccatttgtttatatattgtctgtggatgcttttgcattacagcattagagttgggcagttgtgacagtaaccatttggcccataaaaccaaaccatttgacttgcagagaaaaaaacattctctagctatttacagaaaaaaaaaattgctaatccctaatatgtgcagttattaggctacttgcttgattgattagtctagaatatgattggcaactttttgttaccctacattggaaaagtatatctgaaaatcaccaaccggataccaatacccaagacagtaaattcaagaaatatttgatcctagtaacttgaattatatccacatgcaattctttgttgttatatctggttttaattatttctttcccttgtactcattttgctctatttccaaatatagccataacaaatttaatttgtatttaaagaagtaacatatcctcaaaaaccctgtaaaacatggcaaccagagctgttacatgtatgggacaaactattatgtatacctgtgaacaccctgggagatatcatcacagcacaaaatgacactatataggtttatatctagataaacacatggagatatcactgagctattaaaataatgttttcagtcttcccagctgaacaaagtaaagaagaaagaaagttacttaataaaaactgctgaaatgtgtttaatataaaataaaagtttatgcacttaaactaataatggtggtaatttcttacaggtgcatcagacaaaaatcagcttctttatcaatggcgtggagaaggatcatacacctttcaatgcaagaactctaagtggttcaattacagattttgcatctggtactgtgcaaataggacagagtttaaatggtaagtttctgacttcagaatgttatttatttcatccaattacattgttcttaaaaatgcatcaaacaaataatattttaaaatatctacgtgtattcatcttctagggctactgaacaaattaccaccaactggatggcagattaatgaaagtaaaatttattttttcacagttttggaagctggaagtcagaaattaagggttcagtggtgttggttccttctggaggctctgagggcaaatctattccatgtctctcttcgtggtagctactggcaatccttagtgttcctttacttgctgcttcctaactgcaatcttgcctcagtcttcatgtggccttctcctctgaatcttctcccctttacctctgttataaggacacttgtcattggatttagggcccactcacagtcaggaggatctcaccctgagttccttaacttaattatacttgcaaagaccctttttccaaattaaagtcatagttacaggttccagatggataatagatcttttgggatctactatataacttactacatttgggaagctttcaaatataaacttctttattctgatcagtttttaagtaatttcaatgtgtaataaactatatttcctttctgtctcttttctgaggggtttgcattttcatgtagagaattgttaaagtagaactacgaagtattagatggaacctgagaaatagtattgacatgtaattaactggactgatgtttacatttactacattaaaaatgggccatatagtttaagaagatatcatatactatatattgaataaaaccagaagttgaaataagaaattatcttgaaatatctagtacagtggtctttaaaatgcctgcatattaaaataaaaatagtattttatattattatataatatatgctcattataaaaaaatctaaacaatatggaactctgtgaaatagaaagtattttccatatttctatcttcagagatagatataatttaacttttttatactcctacagatttttagtacatttttagctagagatatagttataaatacatttttccaaaaataaaattacaatacatatgcttcctctgagccttctaaaaataaatacttctccttcaaatgttataaacaacgtttcatgtcaatgtatcttctcatttagatatatgttctcatttaaaatggctgtattctatgcaattgtatagttgcaatccatgagatttcttaagctcctataatgaacatttaggtttttttaatgtttcagtgcaattagcagttattttatggaaaatattatatatatatccacatatatttatatatctgtgtctatatctacatttccatttatatatatcaaccatcaatctatcaatcatatacatagatgtatacatacgtacatatgtatttgagcagttgcctgattgcacagttccttaatatcctatttggtgccaacctgcgtgaattcatatcccatttcctcacttactagctatatggcctggcaagatattttaatatctctaaagtgtagtcaccccaactttaaaatgatgatgatgatgatcataatattgatttcccatagggccaatgtaaggatcaaatgaagcaatgtcatgtaaaacattactgtgtttcaagcacctggcatgtattagatattcaatatttatttgttaaatgaatgaatggatgaagtgctaagcacaatgcctgtatataaactatattttctctttcttgggcatggggctggattttaatgtacagcattgttaaagtaggactgtacagtattagatgaaaactgagaaataatattaacatataattaactggactatgtggtttatattttcgcacactaaaaattggccatgtagtttaagaagataacatatatgctatatattgaaaaaaattactaaactatatcagtaaataataataatattattattttattattatttttttttgacagggagtttcgctcttgtcgcccaggctggagtgcagtggtgcaatctcggctctctgcaacctctgtctcctgggttcaagtgattctcctgcctcagcctcctgagtagctgggattacagatgtgcaccaccacgcctaacttttgtatttttagtagagatggggtttcaccatgttggccaggctggtctcgaactcctggcctcaggtgatccacccaccttggcctctcaaagtgctgggattacaggcgtgagccaccgcaccctgccgtaaataatactattattaatgttattataattatttccaaaaaataaattcatagaagttgaatggctgggttgaagtatatggtcattttatattttaatacatattacagagattgctctaatgcataacaatgggctacctccagaaaggttgtgaaaatttataacctcattaaaatatatagccaagtacttgtttccttaaacactaactatccttacaaattatccacttttttttcacccttgacattcctctaagtgaaaaatattgttgaatgctgactcagaattatttggccattaatgagtttgagtagctttttacgtatgtcttgatcatttgcatttcatttatgaattccttattcatacaatgtgtccatatttatactctataattccttatttatttataaaaactcatttatgttaagaatattatgttgtataagttttcttcagttttttgatggcttatgaactttgtggtctagatattttaaagtaatcctttaatatttaagcaaaataaaacatgtatgcaagatagtgcataaatataaaaggtatagcttgatgagtttttaatatttatatacacctgtgtaactctcatttaaaaaaagtcgtagaatatttccagaatctcagagtcccctaatgaacatccactgtaaagataaaaacagaatagcatcaatgtagccctctataaccatagattaatgttgcctgttctcaaactatcatacaaataaaatcatgaagtaggtactcttttgtgttctttttgcttagcactatgccaatgagatttttccatagtgtatgcagttatatctttagctttagcaaataattctgtaaagttttccaaagtgggtgtcccaacaagcaacatttgaggatttcagttgttccacatccttatcaactgttagttttgccagatgttatcattctttgccattcttgtagccatgtagtgcatttcctgatcattagtgatactgagatcttttcatgtgcttatttgccaaatgaatatgcttttttgggaagccttttgccaagttttaattggacagtttgtatttttcttaataatttataggaggtcttccatattttgaatatgagttctttgacaaatacatgatagcaaatatggtcttctgggctaaggcttacagtcacattctcttgatggtatttgtcgataagcagatcttcttaattttaatgagtctaatttagtcattgttttatacttaatactttttgtgttctgtttagactatttttgcaaaccctgatatcacgaagatatcctcctacagtttattcaggaagctttattattttacttttcaaattttggtctatgttctatctggaatagattttttgaggttatataaggtaggggtcaaaatttttgtcccacctgaatgtgtaattaacctagaaaaccttgcctcttgaaacaaatcaatgtttctaccattctgcagtggtaacgttgtcgtgaatcaggtctctgtatatgtgaagatgggtttctttctgaactttctattctgccccagtgatctgtctgtctgtctatacttgggccaaaatatttagttttaattactgtaacttcatacatgtcttcatatctagtagttctccaactttttttcttttaagattgccttggctattatatatgaattttagaaacagtttttcaattttcataaaaaattctgttgagatttaaattactcatttgtatttaggagaatgggcatctgaacaatatcaagtatccagcccataaatgtaatatattccttgatttctcccagcaatgtttttagttgtctgtatagaggtctcactcctatttgttagacttgttcaaacatattcattggttttccttcttaatagactatttttttagagcaattttagagtcacagaaaaattgagtggaaagtatagagagttccagtatactctctgctcctacacacgcacagccttccccattgtcaatatccctcaccagagcggtatatggtatatttgttacaattgatgaacctacattgacacatcattatcacccacagtccatagtttacattaaagttcactcttggtgttgtacaacgacaagtatccactactccagtatcctacagagtagcttcactccctaaaaatcttctatgttcctcatattcatccttatctctatcctaacccctagcaatcactgatcttttcactgtctctgtattttcaccttttctagaatatcatatagttgggataaaaaaatcatgtatcctcagattggcttgtttcactgagtaatatgcatgtaagatttctccatgtctttcatggcttggtggttcatatcttcttagtactaaataatattccatggttagatatagcatagttgatttattcattcacctactgaaggacatcttggttgcttccaagttttggcaattatgagtaaagttgctataaacatcagtgtgtaggtttttgtgtgaacataagttttcaacttataaataccaaagagcgcaattactggatcgtatggtaagatatgtttagttttgtaagaaactgtaaaattgtcttccaaaatgactatatcgttttacattcctatcagcaatgaaagagagtccctgttgccccacatcctcaccagcatttggtattgtcagtgttctggctttttggcctgttggttttcatgcaattatacttagtattgtttttgaacttcatttgctaattttgttactattgcattaaaatctaatcagtttttatatttacctatgtttagtgaccttgccaaactcattattatgataggtacacaatcctatcatttgcacatatcaggaactcaactctttttgaatgtttgtaataaatgtatataatggacatgccataaatatctcctgtagatatttttgtctgatgcacttattaattctgaaataatataaaatgttattttgtttttctgtatgacctgagttattagaccaatgtctagttttaaaaaagaaggtatatatttttgatattcaaaacactgtggttaaattgccaagctctggtttaaatataacccaggtgtgcttctttgatcaaaatattaactctctttaagtctggtttctaatctattaaatggtggtttaatatataattcataggaatcttataagaattatgtgagatgatgtatgtttagaatataagttgcttgttgtatagtaaatgtgcattaagtggtaactatttttaaactctttgaacatcaattttcttattgtgaaacaataagatagggataacactatatttccatatgattgttgtaccaatcaaaagagaaaatatgaagaccgtattactttagtttgtgtatgctcttagatcaagctaaactcatgtgaagaagcaatattttaaggaacttatatatttaggaacttggtttgagtaattagtataatgcataatcttataaaatactctgcgtgaagaatttttaaataacacattaaatcttgtgagccttatttcaatatttaatccccattagtacttctaaaagtgttttattgcaccaaatgttgctcaaagtatttgatagcgccataaattagtcccctatgcactgcagggttaaaatggcttgcttctattctacttcagtatactaaatgttggattaatgcttcaaaagaacagtgtgaactgaagatgatatttttaaactgtgtagaaataaatttcactcctgattagaaaacatgtaacaggaaaccggtttatttcaaatattatttagttttcattacaactttctcctttatgttcttgacatctgagagctacagaaggaaaaggatattttaaataatttttatctttattctatcaatttatatgtacagtcgtacctactgtatcttttctctaattagagatggcgtatagactggctcattacttctgcctaatgagccaggctccatgccacctctctaatcagaaaagagataggtacagaatgttcctatggacttattataaatcattttctttctcttacttgctcctttttttaatcaaaaaattaagtcactgtcctccatacttttgtccatatccaagatggtttctttcaaaagaggtaattgtgcaagcgattactgagctgaattaaaggtgctctcatgcagtgccaggccggctgtctctgctttggaacagacactgcctcaaacacaagcacatcaaatgaaggcctatagcagatcaagatggatcttttctgtctttctctgattaggtttgacttggttctctgtttctgcacccagaaagtaacaaccttccatatgagtgttggctactacagagctttttctttgagtcttatctctagcataactctctagaaaaatgtgttgccagtgacactttctgttactgcaggacttgtctttgctttccctggaaaagtaatcaatggaccaaatgcatgctttttactgaaccctcatttatccttattaatggtataatctgatttgatcaggctgaattttatgtatacaaatagaaacaccttagaccatctatatcaaccaaagtgtgatggctcctttttagaacattttcttttagttgtagatttattttagtgcttccaattgggtatataacctggagcacttgtgttagcagatatgtagttatgaggagtcagcaatgtcatcgtggtaataaaccatactagctctccaaattttggatttaaaattacagaactacatgaatcaaaacttttcccagttatttctgaacttgtttatcaacagagttctagttgccgattaaaggtgagaatttctacattatacattcaaatgtgcatagcactttcttaagaagatcattggtcattaaggaatcaataaatatttgttgagtgtctgttaaagtgaatatgcagggaagaaaaggatcatcgtctaaagctaactcctacttgccttcctttctgtgttttcaacgttgtgtgtcttagcccatatgcttgtacttgattctaaagttggaatgctacttctaatttctaccagtttcccatgggttcacatttctaacctctgctagatacacaaactccattttagttcagctgaaatcatgctaatttttttcagagagaattatttttgggaattagatttaaaaaaagcttagaaagtattgaaattgactaagagattggaatggaagaagagtataggaatatagtatatagataggagtttacttagtttcagaacattgcagacaaggtatctagcaatattatcagacaagttatgttgtatatttaaaatgatgttaatgtagctctctcaaccatactaagtaaaaactgctgattaattaaaatttgaatgcaaaatatgcaatcataaggtagtagaggaaaatgaaggcaagtgtttctataattctagcatattaaggacctttattagcacgataccatgtccagaaacactaaaggaaaatattgaaacatctgactattaaactgggaatttaaaattcaaacaacgattatcattttgtacttgatagtttggcaaggactagaaaagcgattataccggtgttggaaatagtttggggtaacctggcaaactatcaaaagtaaaaatgcgaaaactacttaatccaagatttctacttccaggacactatctcgagaatataattagacaaagacttaaatacatactcaaaatgttcattgtagaatgatttaaagtaacaaataactggaatcagttaaaaacttcaaaaaggaattgatttaataaattataattcatgcctactgtggaatagtatacaccatcaagaggaatgaaatatgtctctttctatgtacatggcaatgggttcatgatgtgttattacatgaaacaaacaagattgtatagtacaaaattctataaatttaatgtatatgttataaacatacatatacatattaaagttctggaaggaaatatgccaaaatgttcttcagaatgttagtaatgttaatctctatgagtgggattgcaaataattgctttttaaatttctttttgtgcaatttttttcagtaaactataattttataataagaattaaaaatattttccaattttggacaaaataataaatggaagcattttcagaatagatttattctatgaatgtaacaagttcagccagagacacctaatttgtatagtacagagggtggtcttgaaaatgttagtcatttaaattctgtacttgtcacatggattcaggaaacacaagcgttcattggacatttaactcattgtacatacaattattattactataataatttgtgcctgagaagcaaagcatgagatttagaatcagacagatttgggtttgaatgctagttctgcttcttaacagccaagtgactttggcaaagaatataacttctcaatccaatttcctaatatgttttctcatttataaaatgtgttttatacacatacttttcagggtgatcagagagcttataaataacacatgtttgattcatgttaggtattcaataaaatttcgctatcataaatattattgttaatttagttattaagtttattgactgtgatacttaaaattttaacataatggccatgaccatatttaattttttttggctgaaaatcaaaatttacttagggtgagggagaaaaaaagtccagtttagattcattatgtagcagatattttaaaattctgtgttttgtctatgtaaaccccacaaaataatttctctctctttttaaagatctgtcctttctagtgttcttcaatgtttcctgttcatcctcacttccacctgatgctatttcttcttaatccgaagaacctcccttttcattgcttgtagctcagcctgctgaagcaaattctctcagcttgtgtaaaaatgtctttacttttgcaggatattttcatttgatatagaattctacattgattactgttacttcttttagaactttaaagatgttgtttccttgtcttcttgccttcattgtttctggtgagatatcagccactatttatataaatgttttcttgtatactatatgtttctttccttctttctttctttctttctttctttctttctttctttctttctttctttctttctttctttctttctttttgaagcagagtctttcactctgtcaacccaggctggagtgcagtggtgcgatcttggctcactgcaacatctgcctcctgggttcaagtaattctcatgcctcagcctcccgagtagctgagattacaggtgtatgccaccatgccaatttttgtattttcagtagagaccgtgtttcaccatgttggccaggctggtctcgaactcctgacctcagatgatccaccctcctcagcctcccaaagtgctgggattacaagtgtgagccaccatgcctggcctatatattgttttccacttgatgctgttaagattttatttttatctttcatgttatcagtttatgatatgcctaggaatgattttcattatatttgtcctgcttgaggtttgcttaaattcttggatatgtacgttggtgttttcattacatttggaagttctgatagttgtatcttcaaacttttctttctttttttcctttttttgcttccttttctttcttctgtaataagactctagttagattgatgttagagcactagatattgtcccatagatattgggtacagttttgtttgttcctttgttttcattttccccactcttttttgtgtttcagtttggatactttctatttgacttgtctttatttcactggtcaatttctcttttgtgtctaggctgctgctaagcccatctagcaaactgttgatttctaaattatacttttcatttcaagtattttcatttggccgttttgtagacttcatctattggctcaaattcacccatctatttgcatgtattattcactatcacccctagatcttttagcatttatattataggtattttcaaatccctatttgataattccaacatctgggccatgtctgcatctccttctattgactctttcctctctttacaaagggccacattgtgttgatttctcatgtgtcttaaatatttttattgtatgataaacactttgcgtaaaagaatgaaagaggtggaagtaaatcatattttttggcgtttttccctttacaaagaagagcactgctggttctatgagaccttttgaatgggggtgggcagtaggaaagaaaaaataccaaactgacttgaagttgatctgtacgtgggctttactacagttttaatattatttagctcactactggtttcagatatctgtggatagaattgaaaatagttagacacatgtctggtggggcctccttagaattctaatatgtcattctggcctctgtatggctgcttctttcttactccttctatgcctgaatcctctatttcttacctctgagctaagtatgggagtagccctgggtctcgtccaatgagttacatgtccagtaaatgtttgtgtttcctacaaaaggcttattactttctagaatttaattcatttagttttttctgtgcgctctacattttgattggttaaaaaataatgactttagggcttatctggcttgttttggttgttagattgacagcaaagtgatggtcccttacaactttttacatttaaagcagatgttgaactattataacaacatctaatttatacccctttttttctttggcacaactctgtctatacttaactctccaaccctctagattgtttcagctatggctggtcactgactctgaacaaaaaaggtgcatattacttggccccaaagattattttggtagaattcaggcatcgacgttttaattacctcctctaatttttcatggggattttcagcttttgtgggccctaatttatccctgactcttaacttttatatctgtttctttggtttgcctgaaatctgtttactgctaatatttaaaactgaaacatgtttttttataaatctagccattggatcttgtttcactaatgatcatgtggcatcgtttaatctcggtgcccccagcggctctgtttgttcagtttgtatagcacatgcatctcttgtgtttctttttctgtcagatacataatcatattgattagtgtataccccttataccctgagtccaaaaattcctcatccctcccgggatcttcaaatgatttaacgactttccactatctctcactttttgatgtggtctgttccctccttactcaacttaagtttcatggccagttattataaccacttcttttcatggaactggacttccctgccgttttttcttcacttctactatgatcttggcactaccacagcataggttaaatatacccaaagaggacgactcttcccaccttaaactcatgaccatgaacttcctatgtttcctgatgctgccctgtgatcattccatatttccctcattcattcactttcctgtcttatgccaactatttatacattttcctttctcattatcctgatcctcagtgattatattacctccaactttaccataaaaattaacaaaaagaataaaagagcttctatagatttccactgctatatttatccaccactggcataccacctattaatagatctgaccaagaatatcttgcctcatttttccccaatttactgctgtattgtaaaattttcttgtattaatggaacattttcaagggaataaaggcatgttgttatttttccatgaaaaattattcttgaccctcccccatttcttctactagccattgtcttatttatttgctctccttttagcaaaacttcaccaaagtatattcaaccataggagcctttaattcctcttttcaaattccaccatctacagtcagactttagctcaccactgcacttaagctacacttgtcaaatctctactcaccttcacattataaatctaatagttaatttcaagtctttatctttttgacctattaacatcatttaatggagttgatcgctccttcctccttggtatacgttcttcacttggcatctaacactccatcatctctctgagtttctagttgctgcgtctcagtttgatttactggttcctcttcatctacttgacctcttagtattggtaccccaagccttaagacttagctctgctcccgtgtctacagacactcactcccttaaagatcacctccagtcttatagctttaaatgtcatctaagtgacttgacctccaaatataaatctccccaccccagcctctttcctgaactccagacgactctgttacatgtatcaaactacccaaagtctccatttgaatgtttaatttacatttcaaaattaaacttactttttttcaaaatggaactggttttcttaagctctctcactttgatccatatactacttcttccatggtcttcctcatcacaagtgaaggcaatttcatttttccactaagacagagaaaaagatttggagtcatccttgtcaattctctttatctcatgttcaacatttttttttttgttttgcaaaatcttgttggtgttagaatcaaaatatatccagattttgaatccttcttagcacttccactagaatcatcccagtccaattcatggttgctgctttgccgggattactgcattgtcttttaactacttccaggcactccgctttattctcaacacagcagccataattgttctgttaaatatcagtcaagcatattacttctctgctcaaaatgctctattgtttctccattttaccagagtgaaaaccaccattcttactataacctacaagacctaactgagctaacagcagttacttctctggctttatttcttacatttgtttattttgttctccttgttttacacaaattggcctctttgccgatttttgactatgggaggtgcacttctgccttgataccattcgctgttctttcaacctggaacttttcacctcctgatatccatcaggctgactcccttacctgattaggtctgctcaataccagtttcttaaatacatctttcttatcaccccgtttacatctgcaaacaccacctccccactttgggtctcattatgttgctctattcttttccatagcacttagcatctttaatgtattatagaattgacttatttttgttgaatatatctgtttttccctctataatataaaagagaaagcaagattttttttatttgcattactcactgatataccccaggatccagaagattgcctatcacatggtagctactcaatacatattttccaagtaaatgaatcgatgggcagcttccatgcagcattaagcctgtgggtgtgtggaatgcaagaattgaagcttgggagcctctgcctagatttcagaggatgtacagaaaagcctgggtgtccaggcagtggcctgctgcaggggcataaccctcatggccctagaacctctattagggcagcgaaaaggggaaatgtggtgttgcagtctccactgagtcccctctaggacattgccttgtggaactgtgagaagagggccaccatactccagaacccagaatggtagccactggcagctttcaccctcagcaaggaaaaactgcaggcactcagtgccagcatatgagagcagccactggagctaagccctgcaaagtcagaggggtagagcttcccaaggccttgggagctcactcctcccaccaatgtgccctggatatgagacgtggagtcaaaggagattattttggagcactaaaatttgatgactgcccttttgggtttcagacttgcatgggggctgtagcctcttttgtttggctgatttatcccgtttggaatggaaatatttactcaatgcttgtatctgaattatactttggaggtaaataactgggttttgattttacaggctcataggtagaagggaattgccttgtctcagatgagactttggactttggagttaatgctggaatgagttaagactttgggagactgttgggaagggataattgtattttgcaacatgaaaatgacatgaaatttgggaggggccagaggcagaatgacatggtttggatctgtgtccccatgcatgttcagttgtaatccccagggtggaggtgatacctggtgggagatgattggattctggaggtggatttttcatgaatgatttattgtgatagtgaatgagttatcacaagatctggttattttaaagtgtgtggcacctcctcccactttgctcctgctttccacatgtgatgtacctgcttctccttcaccttctgccattattgtgggcttcctgaggcctctccagaagccaaacagatattagcactatccttcctgtaaagcatgcagaactatgagtcaactaaccctcttttctttctaaattacccagcctcaggtatttctttatagcaaagcaagaatagactaatacattatcctttgttactgatgtctaaaaatcttttttaaaaaaattaaaagcaagtatattaagacagtaaaggaataaaaaatggctactccataggcagagcagccccaaggactgctggttgcccatttttatggttttttcttgattatatgctgaataaggggtgggttgtttgttagttttccctgaaaggggtgggcaattcccagaattgaggatccctccctgttttaggccatatacggtaacttcctgatgttgacatggcatttgtaaactgtcatggtactgatgggagagtatcagtgaggacaaccagaggtcactcttattgccgtattggttttcgtgggttttagctggcttctttactgcaatctgttttatcagcaaggtctttatgacctgtgtcttgagccaacctcctatctcatcctgtgacttaggatgacttaccctcttgagaatgcagcccagtaggcctcagccttattttacggagcccctattcaagatggagttgctctggttcaaaagcccctgacaattaccccctcctttttaaaagaaagctcttaatcttaagagttgtagagggatgaagatccatcttctctaacttcttcaagctgaataggggtgatgatattcctgcctaacaattagggtctcttgtctttgggatagagaggaactcaatcagaaaatgctggtatgtcaaggtccattcagaatacttgagttctgacaaaagttgatacctggaagattaataagtatttaatttaagaaaacattcggtaagcttatcctacacaaagagtataacagcaatacattccgcagcagtaaagcaaaataaataaaattatcacaactaaactaaattagaagactttccatgaactgggcaattgttagaaccaagctaatatgtggttgctagtaaatcccagtatgtgcccagaattagaatattgatccagattttgacattgcccattcattttggttttttttgaatagtagtcagagatcacttggtggtacacagaaataagcagagtctgtctaaattacagaaaaaaaaccttaaacacaactaatgagactagaatctaataacaggtgtaccatagtttttgaagcaattctttttcttttcagtctctcatttttactaaagacaaattataatagaatcgatttgtgcgcaaaaatgagctttagtcttatacttggcctgattacttgtataaaatgctaaaaaataactatttttcacataggattttaaaattggctttgatggaactttgttccataaaaaggaatctcagataagacctttttaaagctgagcccagccctgggtttgtacaatcaaatacctatgagttgggttaattcctttactcttgaggtcctaagatatcttcgggcccctgagtctatcagaaagtgacattctttacttatcacaggtcaggaaccctgtacagggcatgtgtaaacaaagaatgtgaccagttttcccaaggggtttttattggctttataagtcaagattgattccttaaaggaaagcacaccattccagtgaaagtcttggtaaaataacaaatttttccaattgtgtcctgttacaaaataaaacagatgcttattgcacttatgcaaatatctattgtcataagttaagaatactcacaaatagtttctaaattctgaagaaattaggtagaatcaaatatgccccaaattttgtttacaggagtaaaatttactcaattgttaaaaagctgtaaatagcttaaaagaaaagttgccttggctctgatagcaaaacaaaggatcagcaacattttaagcaaaaagttttaaaagattacttcagctatctattattcagcccatgcagttaactcttgttcagcttgatattcatgaacatttcagctctccatcagtactgaaagttttatcctctcttctaatgtcacaatcttcaaagttattagaaacgtgcattcaagagcacctgtcaaaatcctatagctgactctaaacttactttttaaagaggattaaaacaggtcaacaattttctatggatgacaaaaagttttagaacgacatatattaaagccacaattgataaagaaattttggttagttctgtgacatacaatgattttactgacaattataactattactgataatgtacactaagtcatatcagaattacaggactttcccataattttggaacacaaaccaataacatatttttacaaatacagtccaaagaaagcaaagaccatttcatatttttctatgcttcctgtatgatatttataccaaataacctgaatatgccattttggactttaggccacctaatagctaagagattaattaggtcagaagaagacatactttgtaattttattttggaaagcttgtcaaatattaaaggtttaaaacactggatatcacaaaatataattccaggtcatcataagtcattcattaggccaaaataataactcaaaaatatttaaaggggaaaaacctttactcattaatagagggaagacttagatctccaaaccatctgtctcttttctttcctttcctatataaaatttcttttttagaaacaacctctttgcatagttgggaatatggctaattccacatgtccccaggccttatctagaatctaaagtctccaaagtaggtaaattgaacaattttcaaaagtcaaagaagcagtttctgaccttaaagcatttagtaaacttaatatgtgacctgcctaatttagaccaaatgtctttattttatcaataatttttaaagctgtttttatttcccaaacattcctaaagtcacatgaactaaaagtgattacactttttacttttctgacaaaatatttgatttagacacttattatttttaaaccgattaatcaaagctcttttatatcacatatgcagcacatataaatacacagacagaaaaagatccagtaagatttttcatttttcggtttcttaactggattactggcttcagggtggagccttagaggaacagagccaagaatgcgtgaaatttctaaagcctaataagcaggcacagctggaaggcaaactagatcttcaggaattaagggttccattttaatagcagattctggatcccaaaaagagggaattagcccatctcccatgggagtcttacctctcagtggggagtgggggcatttccataacttctaagtgaccaagagcatgcttctctgatccaaatgtgcaaagagccaagtattccataactgccattagccattctcaaaagtgtatttcctacctagttattgcataccaaagctctttcctaatgtaaagtgatttctgatacccccaaaagtaaaaaacatcagataacgcaatgcgaaacacaagacagccttagattttgagagggatctatccatttccaattcctgggatttcatgaggaaaacagatgttttttctcaaaatggggtctgtggtgctcctttttttcccaaggagtcccaggctgttagaacttaaatatctgcttttaattaagctgacttttaatggtactgctgtttttaaaaagtcctcttaaatttcttattacctgactttagccaggcgaaactgtcaataattctggcttttgaactttatcaaaggtaacctcccaggtgttcagagaaaggaaaattcaagacagaccattgaggggaagagaatcaacaaatgttcatgcgcatatcaaaccagaaaggactcattccctaagctgggaattgaaccctgaacctgggtcaccattgtgaaaagaaagcctcagctactgagctactcactgggcagtttccattgctcttcccagaaggagtctagagcagcagattttgagcttgcaaaggttttaaatgctcaagataattttgtagagctaactatgacatgaacccccaaattcctgttttctggatggtagagacctagagaaagtaccgccatgtggtcacaaggtcaagctcccaaggacataactagccagtttgctgggccgtcttgaacagtaggcttatggggtcctaagcttgtgttctatcctaaggtacccctctttctaacagaaatatacaggaagacaaattcacagtgcaaagtacaacagattcactgtagcttaaaactagcctcacaaatcctttttcacattaatcagaactttacagaggagataaacagtgatttttaccattctttgaactagtttgcacagagagaaagagagaggacagaagtctcactggtaagaaattcttacccttttgctggcatgccaggcttctgggttccctttccctgagcagtcctagtgacccagcttgacgcatcatagccctgggggccaagctgcaacacaaaggaaaattgtctttttttctgtcctggccagagcaaaatatgtgtgacatagacattagccactctgctcagcatccaatatcaaactaacaaggctcaaatttgcccctggttggaccctgtcatcattaatccaacctctgaccagaagtttcaacatgtggtctctgggcaagatggtcaccctgagtaagagaaaaggtaagaaagggaaaggagagaaagaaagaaaagcattggctgcatacagcagggtggggaaggcaaaataatcaaggataccagagaaagaccctcccattgcgcaaaagttcaggctgccgcttgaagggatctgtcatgaagggatcttttccagtagtcccattagctctcaaacatcccccttttgggaggaaaaagctccccaagtcccacattcacatgcatgcctaattatgtcacccacagccatcagcaaagagggcaaggcagattaacccaacgagaatagcagttaatatctcgtattgccaaacccattattagctgagagggactttactgagaggggcctgaaaccccctaaatcttaggaaggactctaaccttcttaagttgggccttgaatccatgttctgtcaagtgtccttgtcttttattaagaggggcctttaaccacctctgtcttaagagagactctaacgcccctaaattaggcctctaacccatttccatcctttacccaagcaaatgtaccccacttacccagagtcagccaataagtgctgaagtctatttcctttgggtcaggggagtctcctccgtgttgtcccttccatggttcaccagaaagatgttaccagaaagaggtccagatccagaccccaagagatacattaaaacaaagcaagttttccttttgaacttgtcaaaaattccatcttgtaaaggatattaaatgttgctttaagctgaaccttgagcaaattaggtggtttgtgtgaccatacatgtatgtggtggcttcttgtttgcaacttcaaggaacaagtattaatagttcagtgtatgatgttgatttgagttgagcatttgcagtttggataatcttaaattttgacagacactagctgtggagactctttctgttactaaatccttttgttttgaagctattgccattcgtctttctcttgtcctttatattttttgtctgtttctttaagcttttattggaaatgtgcataagtaaagaattacttgtgttacttgccaagcaatgcacatttcatagttttaaatctgtaatcagcaataaaaatcctaaaatatgtatctaagaacatcttaaaaaattctttctcactcaagaaagaattcaaggtgagtccatagagtaaagtgaaaccaagtttattaagaaagtaaaggaataaagaatggctactccgtgtagagcagcacccccaatgtctaaaaatcttaacaatgataataaaagcagaaaacatatggtaattttttggcataaaacccttactgcagtgagcattaaaaacaaataaactgctttggttcttcattctagagacatcatatttaaaaacttagatttcattatttgattttcattttgttacaaaataaaatattcttagtgtcacactaaacagagatcagataattaacctgaccccatgatgcataattttaattttaatttcaatttgagttcttaatagaaataatgaaaggctgttatcatattttggttgaatggacacagatctatttttttatggtaccacattgagaatttgtttttttacatatataaatctattaatggtattgtcaaaatactgtcttttttttttttttttaagatgtagtattgctttgtcgcccaggctggagtgcagtggcatgatcgtatcctagtgcagtctcaagtaatcctcctgtcatagcctactgcatagctgggagtacaggtgcacaccaccatgcctggctaatttttttttttttttttttgtagagatggttcttactatgttgtccagtccagtttgaagcaatcctcctacctcagccacccaaagcataggcatgaaccatcaagcccagctagtcttttaagctttgttgttttgaaaataatgaggattattactttgatatcatattagaattttttctaaaaatttaacaagaaattatctttagttctgtataatctgtgggcagctatatctatttataagcatctatgccaattattactttacttctagttgtaatttaaatttgttttagttttcaaggacacagctagtcttaataacttgatttgtttttatttccatttattgagtttagcatttataataacttaaaaaaaattttatttcactttaagttctgggatacttgtgcataacgtgaaagtttgttacataggtatatgcgtgccatggtgatttgctgcacctatcaacctgtcatctaggttttaagccccacatgccttaactgtttgtcctgatgctctctctcccctccccacacctgaaaggccctggtgtgtattgttcccctcccttcgtccatgtgttctcattgttcagctcccatttatgagtgagaacatgtggtgtttggttttctgtttctgtgttagtttgctaaggatgatggcttccagcttcatcagagtttctgcaaaagacatgatcttattcctttttatggctgcatagttttccttggtgtatatataccacattctctttatccagtctatcattgatgagaatttgggttggttccatgtctttgctattgtaaatagtgctgcagtaaacatatgtgtgcatgtgtctttctagtagaataatttatattcctttgggtatatgcccattaatgggattgctgggtcaaatagtatttctggttctgggtctttggggaatcaccacactgttttccataatggttcaactaatttacattcccaccaacagtgtaaaagtgttcctgtttctccacagtctcactagcgtgttgtttcttgactttttaataattgccactctgactgaaatgagatagtatctcatggttttgatttgcatttctctaatgatcagtgatgttaagctttttaaaaatgtttgttgactgcattaatgtcttcttttgagaagtgtctgttcatatcctttgcccactttttgatggggttgttttcttcttgtacatttgtttaagttccttgcagattctggatattagacctttgtcaggtggatgggttgcgaaaattttctcccattctgtaggttgcctactcaccctgatgatagtttcttctgttgtacaaaagctctttagtttaattagatcccatttggcaatttttgcttttgttgcaattgcttttggcatttttgacatgaaatctttgcctatgcctatgtcctgaatggtatcgcctaggttttcttctagggttttaatgattttgggttttgcaattaagtctttaatccatcttgagtcaatttttgtgtaaggtgtaaggaaaggttccagtttcagtattctgcataaggctagccagttttcccagcaccatttataaaatagggaatcttttccccattgcttgtttttgtacagcttgtcaaagatcagatggttgtagaagtgtggtgttatttctgaggtctctgacctgttccattggtctatatgtctgttttggtaccagtaccatgctgttttggttactgtagacttgtagtatagtttgaagacaggtagcatgatgcctccagctacgttctttttgcttaggattgtcttggctatatggactctttgttatttccatatgaaatttaaattagttttttctaattctgtgaagaaagtcaatggtagtttgatgggaataggactgaatctataaattactttgcgtggtgtggccattttcatgttattgattcttcctatccatgacgatggaatgtttttccatttgtttatttcttctcttatttccttgagcagtggtttgtagttctccttgaggagctccttcacgtcccttgttagctgtattcctaggtattttactctctttgtagcaattgtgaatgggagttcattcatgatttggttctctgcttgtctatttttggtgtatagaaatgcttgtgatctttgcacattgattttgtatcctgagactttgctgaagtcgtttatcagcttaaggaattttggggctgaaacaatggcgttttctaaatatagaatcatgtcgcctgcaaacagagacaatttgacttcctctcttcctgtttgaataccctttatttctttctcttgcctgattgccctggccagaacttccaatactatcttgaataggaatgatgaaagaagggatccttgtcttgtgccagttttcaaagggaatgcttccagcttttgcccattcagtataatattggctgtgggtttgtcataaatagctcttattattttgagatatgttccatcaatacctagtttattgagagttttaacaagaaggggtgttgaattttattgaagcccttttctacatctatcgagatgatcacgtgattttgtcattggttctgtttatgtgatagattacgtttattgattgtgtatgttgaaccacccttgcatcccagggatgaagccagcttggtcgtggtggataaggatatgctgctggatttggtttgtcagtattttattgaggattttcgtattagtgttcatcagggatgttggcctgaagttttccttcttttttttttttttgtcatgtctctgccaggttttttgtatcaggatgatgctggcctcataaaatgagttagggaggaattcctcgttttcaattttttggaatagtttcaaaaggaatggtaccagctcctctttgtacctctggtagaattcagctgtgaatctgtctagtcctgtgctttttttggttggtaggctattaattactgcctcaatttcagaactcattattcgtctattcagggattcgacttttcctggtttagccttgggaaggtttatgtgtccaggaatttatccatttcttctagattttctagtttatttgtgtagaggtatctatactattctctgatggtagtttgtatttctgtggggtcagtggtgttatcccctttgtcattttttatgtgtctatttgattcttctctcttttcttctttattagtctagctagcagtctattttgtttgtttgtttgtttgttttcaaaaaaaacagctcctggattcattgattttttgaagggtttttcgtgtctctctctccttcagttctgctctgatcttagttgtttcttgtcttttcctagatttttttatttgtttgctcttgcttctctagttcttttaattgtgacactagagtgtcaattcgagatctttctagctttctgatatgggtatttagtgctataaatttccctcttaacactgccttagctgtgttccagagattctggtatgttgtttctttgctctcattagtttcaaagaacttcttgatgtctgctttaatttcattatttacccaggagtcgttcaggagtaggttgttcaatttccatgtagttgtgtggttttgagtgagttttttaatcttaactctaatttgattgcattgtggtctgagaaactgttataatttcagttcttttgcatttgctgaggagtgtttactaataactttttaaaatatcagtgatttttccaggtaatagacatttatggctttgaaatttcaaagtatgtttaaacaaaaaaattcatcaacaacctcctcccacattctgcatttacatttatcattatcatgtgtgttcttatacttttattattagattgaaaaatatacaattgccattcttatagattaaaaatggtcaaacattggctatttcaaatagttcaatatgtaagtatctcaaaataatataacacatgctgttatctttatgttgttagtatttatgtaagtgctcatatatatatatgcacatatataaaaatacagagtatatcttcaatttgcctttttcataaataatttttctgagaattacccattttgatattttgttcattcattttagtttctctattagtattccactttataaaaaaaagtatggattatgtatttgtttccatgtggagagttagcttttctctttatataatttatagaagattgcaattaatattttgtatgtctccttgtgtgcatttgtgagaatttgcacagaaaaagcacagtgaaaggtatcataggcttcttaagtattcttatcttccattttgatatatcgccaaactgttatctaaagtggttgaaccaatttgccttcctatggcaacaggtaaaatacccatttgcctgtgttatcaacatgttttgttttccaacatttttgccaaaatcatgagtataaaatactcccttattttcgttttaattttaatttctttagtaactattaaaatattgaaacatatggcatttgagttttcgcctctgtgaattgcttgttctggtatatctttcattaaattttccattgcatttccttgtcagtaaaagttacacttataatctgcattttacatgttttaattatattgattgtaaaaatatttccttcagtggtttgacttttaaaattttttgtatttttggtctgtcacacaagagttttaaattttaacattggcgaatatatcagttactttttatggttcagatagttttatatcttacttaagaaattctcttttatcatgatatatattgccttctattttttctgaaattaatttttgtataatgtgtgaggtagagatttaattttaacttatctttattggcacattcttgtcccactgatttttattgaacacacattatttcctcactgatttttaaagccacctctactgtatctcaagctccaatttgatggtagtgtgtttaacatcttgtttcagaggtcaatttgattaacttcttgccaaaagctatagcacttgattatcttttgatatcttgcagtggattccttcttaccagccttcttcagctattgttaggtcttactcctccaaatgaattttaggatcagtttatataaaaatgtttattgagattttttattggaattgaattaaatttatacaacagcttagggataatttatattgttatgctgatttttttcatccatgatcatagtatatcattctatttatttagatcttcttttatgtcttttagtaaatttctataaataaaatactcataacttataataaaagggataaatataaaatttattcctaggtatctcaaggttttggtgctattgtaaatagtatcttttattaaattgcattttatatttattgctgatataaagaaatattataaattgttatatatcattcttatttccaacaccattttggaacacattaattcgaatatttgactatagatttatttgaattgttgaggtagaaaaccatgtaatttgcaaataatatatttatgtcattctaattcttatggattttacttcttttctttgtctgattgtgaggtctagacattcctttaacaatcttggaaaaaaaagcagtgagagcaagcatcctcaacttgtcattgctttaatggaaatggctttacattttttcctttaaataagatgtttgccatatcacgttaaaaactttcccacctattcctaattgtttagggttttctacttgtatattatgtatttttcaagacatggcagatttaatttgttgagatataattttcatgcctatgctaccaagtgagattggtcctgtcgttttcctttctcttaatgtccttgagaacatgtttcagctctcccatttatgacctgttttaccttgggcaaatttcttaatatctatatgcttcagtttcctcatctttaaaattagcatcaaaagaatatctttccatagtgtttttatgaggattaaataaaataatatacataaagcacacagaacagggcctgctactcagtatgcaatagttattagctgtcattgtcatcattaatattaagatattttaaaacacttttcccctaaaatacttagagtactttgatgcatatcctaagatctgtctctggctgctatttctggacatttctttgttgtaatatttctggtagctcttacttgtgactgtgaattgtagacatttgatgcccacagactattcagctctttcaacttctaccttgttcctaaggaaatctgaatcaattcatcagggtctttcctaaagaaatttgtcgaagttatccaatccaatgccacgattatatttcttcttgtatgattgtgtttttgttgtttgtcaaagaaatttttgcccaagtcaaggtcacaaagaattttcctgtaattttttctagctatattatagttttaggttagttctattatccatattgagttaaacttttacataaggtgcatgatatgttttcaggtgctttaaaaaacataagatatccaatattccaggaccgttcttggaaagaagagtattctttttccatttaattttctttgccacttagttaaaatacagtggactgtgtatgattttattatcagcattttcattgctactgaaatgcagtaggtatgcaattgattttcatgtattgatattgcaacttgcaactttgctgaactcatttataattcctaatagattttagtagatttcttagagttttctatgtacaagagatagttttacttctactttttcaatatggaaagatttatttcttctgcttgcctatttgccctgtctggtaactacagaaaaatgttgactagaagtggcaaaagtggacattgttatcttgttcctgatcttagggaaaaagcattttttcaccactaaatatgatgttagctgttggtttttcacagataccctttattagatgaggaagttgtcttctttaatagttagttgctttttaaaaattttatcatgaagtgttaactttgactatgtagctattaagatgatcatgacgtttttgtcctttatttttccaagtttgtgtattacttgattacttttcgtacattgaaccagccttgcatccttgtgataattccacttgctcatgatgtatgatcctttttgttagtactgtatttggttcactagaattttgttgaagacttttgcatctgtattcataaggcatattggcctatagttttcttttgatgtctttgatgtttttggtattagggtaatactggtttcatagagtaatttggagagtgtttcttcctcttctattttttggaagggcttgtgaagtaatggtgctacttcttctttaaatgtttggtagaattcgccaatgaaagcatctggtcctaagcttttctttgtggaaatttttaaaaaattactaatttgatctcttttagtggtatagatctattcagattgctaatttcttcttaagtcagtttacatagtttgtgtgtttcttggaatttgtctattttatctaggttgtctaatttttggcatacagttgttcatagtatcccttatgatccttttttgtgactgcaaagtcagttgtaatttcccttttttaattcctgattttaatcattagagtcatctcttttcttggctagtctagttgaatgtttgtcaaatttgttaataatttctaacaatcaacttttgttgtttttcttgttgtttttctattctctattttatttgtctgctcaaatctttataatttcctttcttctgctagctttaggttgagtttgtttttctttttctagtttcttaaggtagaagattaggttattgatttaataaatttctctttaaatataagtgtttacagctctaaatatcactttaaacactacttaaatcccataaagtgtgatatgttgcatgttcacttccattaatctcaaaggatttttaaatctttttgtaatttcttctttgatcattagttattaggaatgggttaattttcacacatttgttaattttacaaatttgcttctgttattgatttctaattttttctattgtgatccaagaatatactttgcatgatctcagttattttaaatttatagagacttgttttatggcctaacatataatctatcctggagaatgtaccatatgcacttgagaagagtttgtattctgttgttgttgggtggagtgttctgttggtgtctattaagtctaattggtttataaagtcattcaggtcttccatttctgtttgtattctgtgtagttgctctctccatgattgaaagtaggatattgaagtctccactattgttgttaaatggtgaatttttctctttaaatctttaaatttgtcattttactgttgttagacacatacatgattataattgttttattttcctgatggattgatatcttaaaatattcttgtctctactaaaaattttgtctaaagtctattttgtctgatgttagcataggagctcaagctctcttttggttattgtttacgtggtgtatctttcttttcattcttgaacattcaatctatttgtttcctcgaatgtagagtttgtctcttgcagaactcctatagggggtcatgtttgtttgtttttccattttgtaaatatctactttttgattgaagtgcttaagccatttacatttagcacagtgactgataaggtagttacaatgtcactttgctgttggttttttaaaatatgatttatgtcttctaaatttctctattctttcactgtcttctttgggttaaaaagttatcttctagtgtataatttaatacccttgtcatttattctactatgtttgttgcccaggatgttatcattaacatcttaattcataaaaatctaattcaaattaataccaacttaattttaagagtatgcaaaattttgcacctatatagtttttgttcactctgctttcttttgtgccgttattgtctatggagattttttacattggatgcccatcaacacagatatataattattgctttataaagtcatcttttaaaacaaatgtgagagagaaaaagaattacagtaaaaatacatttataatctttttaaatatttacctatttaattacctttacaggtactctttatttcttcatctggattacattgctctctaatatcctatcatatcagccagaaggacttcttttggtatttcttgtagagcaagtctgatagtgataaaacctctcaatatttctttatctggaaatgtcaatttatcctgcatttttgaaggagagttttgctagaaaaaatagtttttggtgtacagtttttttttacgactttaaatatgtcattcttctcccttctggacgccatggtttcttcacaagaaatctgtggttaatcttattgaagatcccatgtaggagatggccttttctcacttgctgctttcaagattttctctttgtctttgtctttcaacagtttgatttttaatgtgcctagggtgtggatctatttgaatttatcccacttgcagttcattgagcttcttggatgcatagattaatagttttcatcaaattttggaagtttttggtaattatttctctaaatattctttcagtccttttacctcttctctgaaactcccattatgcctatgctggtactcttgatggcgtcccacagctttctggggctttgttaatttctcaacattctttctctttctattgctcacactgaataatctcaattgacctgtattcaagttcattaattatttcttctgatcatttagatctgctagtgagctcctctagtgaatttttcatttgaaagttttctattttctatttattttttctttttttgatgaaatgaggtctcactacgtttcccagggtggtctcaaactgctgggctcgtgatcctcccacctcagcctcccaaagtgctgggattacaggcatgagccaccatgcctggctaaaaattttctatttcttttctcatattctatattgtctaaagcatcattgtcatactttgctttagttctttggacactttgttttgttttgtttttagttatttgaacatatataaaatagttgatttaaagtctttgtctggtaagtttaatgtatgagcttacaattgacccatttccattgcccatttttcttcccctgtatattgtttgtaggagtttctttgcatatgccatattctttgttgaaaaccagacattttaaacacatagtgtagcaaatctggaaatcagattatttccctttccagagttgttttgttgctgctatttgtcactattactactgtttgcttgtttagtggctttcctgagctaattctgtgaagtctgtttctttgtcatatgtgataaatgaagtcattgtttgctcatcttagtagtcaggcaatgactgaacagagaatttcttaaatgcctagaaccaatacattttccagtctctggtgagagatctgtacgcatgttgcagaatgccatcaacactgaggcagtttaacactctcctttagtccccacttcctgcttgtgcagagcctcaaagtcgagctgaggtgagaccttaggactttctcaggtctttctttagcatgcgcatatacctgagcacatacttagccttttgcatgttcataatcttgtagattcgcaggcattttttaaggatttgcaaagcgtttatggacatgatgtttcacatcttctccttttaagtattttggattgtttgttgtttcttctgactgttgttactgcctgggtcaactgcaatgttaagcagttgccagtgattatttttagcaaataattgttttaaacaaacagagtaaatgctgtttccagtggatgaactctgagtcaattcaagccttactagtggggctttccatggtacttccaggcagatcgaataatgacaatcatctgaggatagagctttgaaacagctccactcccattctgatcctctagcagtaactaggctgctggttttcaccctgattgcaaactgttcattttcagggcttccagagagtggcagagaggagtacgggaataggaaagctaaaatgccatagaacatgttgttcttaccaatattcagtcatttaaaaaataaacactgtccacattgttgcaagtctttgctttatttccagagttctcaataagttgatgtgatattctttgccagtgttcccattgcttttatggaagacagactcttccattgttttcactctgccattgctgatgtccttttattcgtttcctcaatgtcttatagtttttacctatatacattgccttgctttaatagatttataactaatatttcacattttcagtgctaataaaatagtatttaaaagttttaatttccattggttaatcactagtatatagaaattaaattattactcatttaacttctatcaaacaaaattaactaattcacttgttatttctaatagcttttatgtacagtcatggaaattttctgagtagataattatgctatctgcaaatgagagtttatttctttccttctgattgttgtgacatttgttacttagccttattatctgtttttaccctgatttatatgttggattacttagttttcccatttgactaattttgttgtgccacccagttgtaatgcataacaacttctttccagtcatcacctgtctattttctgactagacagctatgaggtctttcttgtatgagtcatgtctatttccttgatcaatttatataatttagacatatctttgccatatgaatatttttcaaagaagaatttttatggaatgtttatcccaatgaatatctgttgttaaaaaattggcaagtagcaaaggaataagtaaaatttatttctatggctgtccttgaaatatttgatagtattctcacctcaaatcataattcttttatttgggatggatgattcacattaactctaggtctttagaaaacttgctgtaactcttttttatgaagaatttcttcaaatatgaattctttagcaatggatatgattgcaagctccaaaatttaaaactaaaatggtttttaaaggttataaaacccagcccctttattttatagataataaaatagatttcattatccccctgcagcagagcttccctttagctattattaaaatatagggagtgaattctaatttatcagcattgaaaggtacacctccacttctaataccctggtctgactgccaacatttttcacacatatgactgtaatatcctcctaactggcctcttggcttctactcttatcttcctatattctagtctcagaacttttgaataatcctgagatcacatcactcctcttctcaaaaccctccaatggcttcccattttactcagaccagaaatcaaatttcttacagtaggctattagactttgtatatataacaatttgtacctccatcctcccctctcccccagccagctacttgtctgacctaaccttctaataacctccccccttttattctgctccaggatgctagctccttgcacctcctctaacatgccaagcatactgatttagaggtctatgtgcttattaatgcctgcctggaacattttgcccctagatatacgtatgactcattcccattcccctgtcaatgccacattctcaatgaggcctctcttggacataacatccccactaaaatctagccatgctctccaacctgctctaatccttctgtttttcataaaatgtattgcattctaatatactatatgaatttctcattcattatgtttatctacgtgaatgcaagctccataaaagcaagggtattttgttgttgttgttaactgattgtacttttggcactcgtgaaagtgcctggcacataataggcttccaataaatacttgtgaatgaatcaatacgtaaaagaatgaagccaccctgacatttaaagccatggttcaggctttagcaacatcacagtgttcatcagttttgctgtctttcagttatggtaagtctttcaaaattatgaatggctagcccctgtttgttatgatctgggttctttgagataaaacacttccctagaggttatataaaatattttagacaatattttatcctgagaaagcaaattggataacatgaaatgcaggtaatttctttttttctccttgatatctcattatgttggcaaaaataggaaatgaagactgtcagttttccacggctgccatgcaaaagtactgcaaactgggtggcttctcccagaaagagaatgcctaggactatagcggggcacagaaagttccccacaaggagtatttcaaagctgagacattaggggctgtatgaggcagaaaaattggaagcagaggcaaaatgggaaccttagggctgagagagcctgaaggttgtggggcattaaaaattcatgctgtagattaacagtgtggggtgtaaaggatgctaggagaggaagaactgagcatggttagggatagttgaaggtaaagaaaaaacgggacacaggcccagcttccttgacaacattatctcttacctcataaataaaatttatgctatgaggagtgactttcctattcgtctttcctattccccaaataaaagcataggcacacaatggctttgctgtatttgcatgtattcttctcatctttcttctaagaatgacatgtccatctttctaccattccctctttgtttaactttagatcctggatccaggtcaattgatcataaatcatgttgcctggatggccaattaactgaaagaatattttaccatgttttcttatttcttgtaactaattataaattttagaacaatttgtgttggaaatcttctaaagatttctgcaaagttttagtagatttagttttgtcttcataacaccacttggaggaataattctttgcacttgtgccagctgcctgttttaggatagatagagtagagaaactctccctacgggaaagtcagagcaggaggctgcctagagcacatcttcttgtgggcctcagctcatggggtatgtggaagactgagactaatgggtagaaagagagagcctataagtgtatttttcttagactacatcagctgagaatacactaatgaagaaatatttttatatgtaatattttggttattttctcaaatatattatttaatataaatataacatgtaaatatatgaatatacacaaatatatgcatacacacactcacacacagacacatactctttttaggctcctaagtctcacactttgcttgtgagtttcttcctgattctgagatcactatctcagactacttcgtgtgctaattctcctctccatgttttatttatcagccatatcctcactctgtcccagtttcctccaagcaaccaccaaggagcagcagaaaacataaatcaaacattctttaaaactctatcaagacagagtgaaaactgaatagttaaaagaaaaaacacattgggaaaatggtcatttgatgattaaaattgctccaattttatttttttagaactattgaaataaacaattattgaaataaattttgttattaaaaatataacaaaaaacttggagtcggtagtttttctgctttattctgtctccactctcttgggcttatttgtctcagtaagttctgaaaaaatatttgccaaacaaataaaataataccatgtggattaaggttgatagctacatttgccttgaaaggtcacctaattcaaagtagattggtctttgaacctggttttcttagaagattttccctgaggcaataaaattctgagagtgaactatgatactattgatatatgtgaatgacacagaacctacaagtaggaagtcttcgatgagtcctcatttggagattttctagaacagacattaatttaactttagagagaacccaaacagatagcctggagcttggagctataacaggtgggatgtgagagtgaggaatcttccttttggcattgcaaatactctggaaattgcaatcagaagcagatgacaatcaaatttagggctgatgagataatatatctatggagttataaactagagagaaatttgacttgggaagggacttctggagaaagccatgagttcgatcagtaaataggctggccaaagtattcactttgacttaagtcctacagtgtccatggagataactatgattatttttgttattaatgtggaattagcaaactagagattgatctgtaaaagtttcaaagggcagtgacataaatatctttttaaccttaacatcttcaaaggaatatcacttaaatacttgtcaggtattgcttggtaaacagagacttcttatattatgcacatgtgtgtatttgcaggtttagagcagtttgtcggaagaatgcaagattttcgattataccaagtggcacttacaaacaggtaagcagatgttgcattgtaaacctcaagaaccgaaaggataaatgctgaattcacttaaataagaatactatgtagattataccattttttatctttataccatttggcaaacttcacctaattaatgtttacagtgtttgctttggcttagtctatggttgttattcactagtgctactcttgaggaactccttgtaatatgaaattgatcacatttttcctaaggatattctgtaagaaaacttgatatttgaacattttataaaacttgggatacaatgcttaaattttctatatgaggtagtttctattaacaatacttgagaaacttctacatctgccttttttaaattggtttgttgactttatacctactagagaatgtagaacaataaacgtgattaattattttgatacatgggaaattctcaagagactgatctattagacttggagacaagaagaatgagcatttgaagtattgtgatatatttttctattttcagtgaacaaataattatatagactcaggctagctttaatgacattatttccttatcttgagagtagatgggaaatctttcttagggcttcttaaaagcacacagaattttaaaaaatttaagtgaaattctgcttaggatgcctttgaactttcttcttcagcttatgatatcatggtataatagtatattgttgtatggatgagttgatcttatttacttctattaaaaatcaaaaagaagaatgttcattcatatttcttcaaggcagatataaattagtgtggtgggtttccaaatgagaagactagcccttgtaaatttagaagcattgcttttgatgtggttcttagtccatggcagatcattaacaatataaacattctttcttaccaggctatataatcaaggtatgcctcagtaaagggtgccatggccctggaacacagtgttaggtgtatttactgccaaaagccttactatattttagatcacctttgtctaaaatgctgaagggcaatgttgtagtaattctttgggaataaagtttttccttgggagtgaaagattttatactggattctatactggtagcttttggtcccattcaaaacttggtatcagttgaaaagaattgatgagatttaaagaaggtatgacttcatgtgatttaatgaatggaaaagctgcctgactccttcactgctccactggggtctgagaggaaaagcctggtttctctggtaagaccttgattactaattttggcctacctgaaatgtctgggaaggtgctatgtggaagaatgcctataaatagaatgactaattctggtctagaacaagtatattgcccctaatggaaaaattaaatatatctacctggaattggcattctttgactgttggcagccgccatatgatctgaagccaatgaagcattacaggatgtcaggatctgtactgatgagtcacaggaaaccattgacaaatggccttggcctcagtccttcacttaaaacagaagcagataaaatgatacttgctttcgtacttctttcccatggatgaactgaaaacattatctataactctcattgttctccatatattattgttcactctcagtagttagtttagcatcctaagtaaatgtgatcatttctatattatcacaaatagacacggtaaaatattgtggtatttaaataagtatcttaataatcagacaagggcttatgcatgcttcttgatataaataaaaagttaatattaaaatgtgtgggttttgatatacattttatgataatgaatttgtttatttggccaaaaataagttttattttatgtttcatgcatcaaattattaaaactaaatggatactcatgaaagcactaaacgagtgacattcatttgtaacgactcctagaagttctattactgttaagctctttgtccttacagtctccctcttgactcccacagagagattctggaagtcttctctggagatcttctcagattgcatgcccaatcacattgccgttgccctggcagccacccgcgggtccaccctttggcacagcggtactgcattcctaatgatgcaggagacacagctgataatagagtgtcacggttgaatcctgaagcccatcctctctcttttgtcaatgataatgatgttggtacttcatgggtttcaaatgtgtttacaaacattacacagcttaatcaaggagtgactatttcagttgatttggaaaatggacagtatcaggtaatgagaaacgataaggtgtacattaatttcctgtggttattgcaacaaatgcccacaaacttcatgtcttaaaacaacagaaatatattccctaacagttctggagatcagaaatatgaaatcaacatgttggcagggctacattcccttaaagattccagaggaggatccctccttgccatttgcagctcctggtggcccttggtgttacttggcttgtggcaccacaacttcaatctctgcctccattttcacatggtgtccttccttgtttctctgtgagcatcaattatcccttttctttctcttatataaggcccaccctattagacccaggatgatctcatattgacatccttaattatactgcaaagaccctatttacaaataaagtcacatttacaggtttggacagtagtacttggacatatctatttgggaacacaattcaacccactacaaggtgaaaactgaactaggcaattgaaccttgcctcaataaagtagtgtattataatgtatacaataaaaatatctaaaagacaacatgtaggaccttatgtttgagatttgtatcaaaatgatatttatgaaatgttgaaaataattatttttattaagtagcaaaaattaatacaaactaaggtgctttttctaaattaagaagtctctatatatgacatttatttcatagaagtaatgttctttgtttatgtctttatttgcatgttgatttataaaatccttgagcaaatgaacagatacacaattatagaatatgttgcttttaccacagggctatgaagtttctggatgtctaatacatatttgataactataattatgatgaagtgagccaatatatttgaatctaataattccatggtttgatatatactgatggttaaacttaaaactttaattacattaattaactttccattttcaggtgttttatattatcattcagttctttagtccacaaccaacggaaataaggattcaaaggaagaaggaaaatagtttagattgggaggactggcaatattttgccaggaattgtggtgcttttggaatgaaaaacaatggagatttggaaaaacctgattctgtcaactgtcttcagctttccaagtatgaatatttttaaacaattaatttaatagactgattggttattaataatgtacaagtatgctagctctctaggctggtggagacttcccttcaccaccaacttccttgaggcagattctcctaagtcttatccctaaattgggcttaaaactatgtttaaagttcttgtaaaagacattagagtgactcttatttcaatctcactgatgtttcacaatctgattttcagattgtttggcaagttatctatgtaaatagaattttcattatgttttcaaggaactgttttagtgtggctttctatgataatcctgtattgtttatatatgaaatatatggaatatgcttttcctagaatgaataatttaagcttttattgatactgtgtagtaatttctcaacattttgatttctgttttgccaaaaatgtgaatagattttcatgacatcgaatttctttcattaacagttttactccatattcccgtggcaatgtcacatttagcatcctgacacctggaccaaattatcgtcctggatacaataacttctataataccccatctcttcaagagttcgtaaaagccacgcaaataaggtttcattttcatgggcagtactatacaactgagactgctgttaacctcagacacagatattatgcagtggacgaaatcaccattagtgggaggtattattatgaattttgttttcaacaaggtttttgtcatacttactgtcttaacagcacattaagatgtcagagcaagccagatttcaagctttacattttgaaatgatttcatactctaagattttaggggaagatctgtatgtgagtcttttctctatataacattgttatatatatatatatatatatatataaaacgtattttataaataaatatatatatatttatatatacaggaattgattttcaaaagctgttgcttttagaagctatgatactctgaatctgacttagaagtgatttatccaatattttacttgatttgttctggaatataattttcaaatattctcaaaagcaaagagatggagctgaatttggagttgtaactatagcaccagagagtttttaagtacagatcttgatctacctgagttcatagtgcacagttccatgggtaatacttgtttttctttagtggaaagatctgatatgccctaagtagtttataaatgtctgatcataattgagaacatgactcacaatatttaaaaagaaatgacagctgcaaacctaggcagcatactgtctaatatagaaatgtacatatagagtatatttagaatggattgttctggaggaatgataggccttgtgaataaaatatgtctttaaaagcagaccaaaataccagtatataagcattgtttgtttgctaagtcatagcataatgaacaaagcaatactattaaatattcatcatctaactttggaaaaaaaaataaaaaaattgaaatatgttaactgcattctgcagtttattgtcaactttatattcttttttctttcttttttttttttttttgacaggcttttgctctgtcacccaggctggcatgcaatggcatgatcatggctcgttgcaacctcgacttctgggcctcaagtgatcctctcatctcagcctccaaagtaactgggactacaggcatgtgccaccatgcccagctgattttttttttcactttttgtagagatggggttttgccatgttgctcaggctgctctcaaactcctgacctcaagtgatctacccgcctgagtctcccaacatgctgagattacaggcgtgagccaccgtgctcagcctgaactttatattcttaactgtattttaaatagtgtagtaaatgccttcccttggtacgtggttggtatagatataaaaaattccatttccctttagaggttggcttgaaaattatctttacaatacacgggtttggatattggtgacagtccttctgacatttccagataaattaaaaacgtgtatggatatccacacgattaaggagaaactgattttgtatcaattaaatatacaaaaatcttccctgttaaattcacataatgcatatagtcctaggaccttaaatatattcacagttgagttggtgttccttaggagtgtgtgatgctcatgtttgcagatgtcagtgccatggtcatgccgataactgcgacacaacaagccagccatatagatgcctctgctcccaggagagcttcactgaaggacttcatgtgagttctattttatgcatggaaatctaaaaaaaaaatagtagagatggtgactataaattctatgaacttaatcttggcctaacaaatgaaaataaatttaaaaactgatatgaacttaaaatgtcaattattgcagattttttaagaaaaataacagccatcaattaagttgaaattgtagtttttaaaaataatttcagccagagaaattacaactgaaaccaaaccctaaggttcttttctcttttgtttttctttctttgtttcatcagcattatcatgttttataaaacaatttttaatgtgtttggatagcatggcactaaacaaaaaatagtttgattcttactaaagggtatttatacaaaagtatcaataaacaaaagcatcgttagatgaagaacaatgtttatgtatttatgtcaatcaaggttcatttattgctaatatcaggcattttaattaattgaaaatctatagtaaaatgatttatgagttatgttactttagttttctgtgacgatcaggggaattccatagttgaggtggaattttagcttcatctttagggaaaagaggtaagtggaaataaaatcaagaaacattcgttggtaggaatatctagcaacaacatcagaaatagctgatatgaaagacggttcagcagcagtaacaattataccaataatgagagtagataatatagactcttcagtaaatatgtttaagacaactggctgctaatttgcaagaaaataaaattagagctctactgattgtatgtacaaaaatgtatgtggcttaaacttttagtgaaaaataactataaatatattaaaataaagattagaattctatatcttaagttgagggcttttatcagctaagcaaatgaaatacaaacagaaacaaacatctggagctatgaaggaaattaatgacatattctgttatataaatatttaaaattctacacagtataagggttaacataaatgtaaggtagtgataaatgatggattgatagaaaatatttgcatcatgttaacaggtaaagagttaagattcctaacacacaaacatttacaaaatattaagaaaaatataacagtctgataaaaatgagcaaatatatgaacaagcaatttacaaatgaacaaattgtaactttaataaacatataaaagattacccaacctcagttttaatcatattcaacaattgtttttaacatttcaaattagcagaaaatataaagattggtaatatttagtacttgtgggaatataacctttaacacatcactgatgggattgccaattgacacaatagttttggggaaaatttgtccacctctactaaaattaaattttcaaatatagtgaactacattatataattgctgtcattctgaaaagcagttcttcaatgacaagtgtatggaatggtgtattagtctgtttgcattgctgtacaggaagacctgagactaggtaaatataaagaaaagaggtttatttggcttgtggtactgcaggctatacaagcttggtgccagcatctgcttggtttctggtgaggcctcagaaagcttacaatcatggcagaaggcaaagccagaagccagcctcttttaaacagccgtgtctaaacagccatgaactaacagagtgaggtctcactgctgaagggaaggcacttcatgaaggatccacctccataacccaaacatctcccaccaggctcacctccaacactggggatcacatttcaacatgagatttggaggggacaaacatacaaactatataaaatgcttatatttctatcattttgttacataaatatgggcttatatgttagtgcattttagcttttcagatggtagcactgtctcatacactcatgtatgacttgtgaacatctctgcctcttggaccttgccctacacttgtgttttagttagttacttcacttctctgtgaaatttattttaggatattatagagcatcttgctttttaaaaaaccatctgtaaaggttttggcaaattccatttctgtcttctgattcttactctgatctaatttgcttttgactgtaacattagtgagaatagttcaatggtaagaatattatctataatgcagactttctctagcacattcaaaacgtagtcccactcctcagtttcaactaagagtctttgatttagttatggcctactttctttctttctttctatgtgctcagaccaaaactttcatgttctaatttagatattcttttgaatttattttctagatcactactttatatacatctagtcctcaccattagtcaatacttgctttaaaagaagaaatcttttatggttttcttttggatttctaatgcctagagtctttgcatttgatttcattagtatattatgaggaaaaatcttttagaagaactgattttaatatgcttgattgtatggcttatcatattgtcacagaaatgaaattaattggattaacttgattgatttattcttcactgagccataattgtgtgtttaaatttttgccaattttatttgttctagattttaaagttaaagcaacatttattatatttttctactgtcttcttttgatcccttaagatggacacttacttccttataatcagtgatttctttcattaaccttgtcctctcctccacaaagccactaacaccccaattaaaaaatgctttgggatgaatttagcagggcaccttgaactgaatatgtctagtatttgcaagctacagtttggctaataccttcatatgatatgttcttttctgagcttctcttgctttctgttgactagtcagtcggtattagtctctctcatttgcttgtgacgtcctgtcttgttttatctttctgtctttaattgctcacagttaagtgttggatattttctgattcttggatgatttcatgcttccccttaaaaatagagccattaaatgaatgaaggctcatgattggtttcagaagacaagttgggattttcagacttggtctcaggtggtgaatgttggattatgaactagtgaattaattaactataatttgggttgagaatacattttaatgcttcttatttagaccttaagtaccttttgaaaacaaaaatgaaaaactaaactttttttgttattttcctccttgacatattttgatagtttatgaatttagccataaattttaaaaagcaacaaatataatttacttagcaaactttggcaaatgcaaatgcagctgcagggaaaaagtcaatagactgttaagttgaatgatttctcagtcctatgatattttcaataatgtgttgaaaatgaaaaatgattttatagaaacattcataggcatgacattctcctttgttaccattcaaagtattttaatacaagtagagacttacatatctgagaaaagtcgtcttacggtaatttgaaaatatacctattctaatgcttttcttgttgttctactttttaaaattatacgttttaatataagccattcacttcctattgggatccatgttctttttaagacctggacataatccaaaaagaatgtcttcaattccacagtgttatgctatccattaataatattacttaataaacagggcttttgtgaattatattacagacatttggcaaacagatgaaaatgtaaggactgaaaatatgccaattcttggcaattgtctttcctatgagaaagtgtttttagtagaaacaaaaatgaatgaagttgagaaaaggtgaatggtgaattcaggggcaggttcacatatttagccatcctaaggaattttccgtacaaaatactattcatttgtttataaggtcaatgtcacaaattggtggctcacaggtagaaacagtgtttaaacagttttaatttaattttctgcaagagttttcactttaaaatatttatttattcttcaatcttttttatttatttatttttttgagagggagtctcactctgtcaccgaggctggagtgcagtggcatgatcttggctcactgcaacctcagcctctcagcttcaagcaattcttctgcctcagtctcccaagtagctgggactacagctgcacaccaccacacgcggctaactttttgtatttttttttttgtagagatgggtttcaccttgttggccaggcaggtcttgaactcctgacctcaagtgctccacctgcctcggactcccaaagtgctgggattacaggcatgagccaccactcctggccctcaacttttattttaagttcagaggaacatgtgtaggatgtgcaggtttgttacttaggtaaaggtgtgccatggtggcttgttgcatagatcatcccctcacctaggtattaagtccagaaaccattagctattcctcctgatgctcttccccccacagcccccaccatccctaagaggccccaatgtgtgttgttccccgacatgtgtccatgtgttctcataattcggatcccacttgtaagtgagaatacgtaatgtttgattttttgtaccggcattattttgctgagaataatgacttccaactctattcatgtccctgcaaatgatttatatttctggtaatacacagtaatgggattgctgggtcaaatggtatttctgcctctagatctttgaggaatttccacactgtcttccacaatggttgaactatttatactcccaccaacagtgtaaaggtgttcccttttctccacaaccttggagcttctgcacagcaaaagaaactatggtcagagtgaacagacaacctatagaaggggagaatatttttgcattctatccatctgacaaaggtataatatccagagtctagaaggaacttaaacaaatttacaagaagaaaacaaccccattaaaaactgggcaaagaaccctgagttagcgagttgttgccaggggaggacattaatgtcttcttttgagaactgtctgttcatgttcattgcccaatttttaatggggttgtttgtttgagaacagttctcaaaagaagacatatgtgtggccaacaaacgtatgaaaaaaagctcagcatcactgatcattagagaaatgcatatcaaaaccacaatgagataccagctcatgccagtcagaatggcgattattaaaagttaaaaaatgacacaaatttttaattcctcacttctcttaatcagaacatagtctaacactgtgtccatttcctgccatcaacaactcactgattcagggtgacatttaccacatttacaacagtatcactcttgggcttgctacaacattcactactatgtatatccttatacatgggcgacatcactttggtgaactacctggccttgaaagactcggagcttcttaacctcctaaagcaaaactgatggatagattgagacactagaagctagaatacatttttaattattctgagtagagaaagaccagctgttcattgctatattcattgttaactcctatttcttttacccctttataaaaataaaaactcacaaataaccgaaaacaactcaagaaaatctattagcaaagacactgtttactctgagatgaaattaaagccatgcttactttttttttaattacatttttgacatctaaaaacatttaccttggggagcctcactgattctcctctgcactctttgaccaggaactccgatacatttttgtattgtactggcaattttaaggccttgactttaatgtatgatacataccataaatacttcactcatagagaatacttttagaatacttgtcgcatttctttccaagaatgaaaaaaaagcagtaaatgcttaatttactaggctcactttagaactgatttagggtgaaacaaatccaaaagcctagatgctattcattaactttcatacaaagttaaatatttcaaagtagaaattagaaatacatggtattgaacttgcatgaatcattatatatctcacaagttacaaacatgttatttataaatgtttaatttcatttgaataaaaaatagccactgttacttgcatttttaagtaaacttttaattttgagataattatagatttatatacagttgtaaaaaataatataaagacaatttgtgtactctaccaatttgtcccatggtaacatctggcaaaactagtgtttttttctttttacatcaaaagtgtgatttgtgtacaataaaatatacccacttaaaaatatatagtttgatgagttttggcatatgtgtaccctgtgtaatcaccatccctgtctagagatggaatgtttcactctcccaaacgttctcttatgcttctttgcagtcagtgctgtctctgaacccccaatcccaggaaaccaccaatcttatttctatcaatacagattagttttgcctgttccaaaatttcttagcatagtgttatttggtatgtaatattttcgtacataggcttttaaatcccacctcacccccacttttagatcattccctaattacatgtgctgttagctttactgcaacatggtatctctggcccacttaatcagaaatccattataagtatcaaagtgtatatattaagctcataggtacataatacaagctaggaattggaagcctgggtttatctgtcaactaacatatttgcaaagctataatatatttattacttctttttcttatctagtactttctttacttgatctaagagttcaagtgttgaatagaatctagttttaagaaaagtgttgtcagttgaaacttgaatccttatgagttgtctttttcctttaataactacatttacctttcggggctctggccaagagtgatgcaatgatcagtgtctcagccaagcattggcacttcattggctacttagctattctttcgtcattttgtgacatcattacctgcaagggtagccaagccttcacagagcaatttattagtaaccatgaacacttcttattctttggctctaacttatgacccttttataacattaatcatagatcttatgaattaactacaatcaaactatcagtataaatttttgttagcattataaatagcacagccagcttgaaactttttatataataagccttcctaccactcaataatttgaatggtgccaacatcacactctagaatgcttattatataaatgaatatttctgttatttttgaaagattcctttagagcaccaaagtccaaaagtatgaatcatcatgactaatttgtgtcatatttatattatatatcaggctttaccactgcttattttttctctgtttgttcgcagattttaccctaaatatattttatttatattttaattattgtaatgctagtaaattaattcatttttatataactagcattcacacagttcatattataggatctacatttgatatatgtttagtaagtcaaggtaaagaattttctttcctcactgacatgatgatattattaatctttgaaaaacacttgtactagttctttccgtgagataggtatgtgcataaatgcttttaaaatataagttgaaaacatgaaaaagaggttatgagcatggagataaattaagacagccttacagaagaagcaaatagagatagtgaaagtataaacatagtaaaagaaaagataatatttgaagggataagagtaaagaattatctaaaggtgaggaatgacatgatttttctgaatcccaagtaggctaagaaaagtaaatgcatacataggtataatataatgaatccaataatcaccaaagaccaagcagccagaaagacagaaatctgataatcaccaaagacagaacagcatcctaaaaacagccagagagaaaaatacaaagtgtaagaaattaatttctaagacactactgatatatttctcaacagccacaatgaaagccagaagacagcagagtagtgcctttgaaatgcagagagaaggcaaccaagaaatatggaattgtatttgtagtagtaccatcaattagaaacaagaaagaaagaatgcatttttagtttacagatatatatatcaatattatcaccagcagactctcaataaaagaatttttcgagaatacttttcataaggatatataatgtttccagaaaataggcctggtgtgaaggaaggaattgtgagcaagtaaaccagcaaatatgtggataaatatagaggaaaatttactgcgttaaataaaaataaggttatatgtaagaaagagtataaaaagtagcaggataccattaaatggtcattaaaaatagcatttaaagggaaggggtaaactccaacttcagctccctctagccattctgttgcaccttggggtaagaagagcagttactgagaaatacttgtaaagttcacagccaatgagcacagggctcattaaaaactgaaaactaatcctagaatcatagaacaggggtccccaacccctgggccactggtcagtagtggtctgtggtctattagaaaccggactgcatagtaggacgtgagcagctggtgagctatcattacttcctgagctctgcctcctgtcagatcagcagtgacatgaagttgtcataggagcataaaccccattgtgaactgtacatgtgagggatttaggttgtgcactccttctgagaattcctgatgctttgaggtggaataccttcatcttgaaaccattccccatgtgctgccctcacacccagttcgtggaaaagttgtcttccacaaaaccgatccctggtgccaaaaatattggggaccactgccatagaacgctttccctcccctctcatcttaccaccacaccatgaaaggcctgtttgccagagttccctttactcagtacatcatgtctggatttcaacaaaaagttacaaagcacactaaaacaccaaaaacaaacaaacaaagaaacaaacaaacaacctcacagtttgaagagagagagcaaaaatgagaatgagactcagacatggaaaggatatggaaattatcagaccagaaacttaaagcggctctgatgaatacactaaaggctctaatggaaaaagtagacaacatgcaaaaatagatggcaatataagctgaaagataaaaattctgacaaagaagcaaaaagaaaagctagagatcagaaacactttcatagaaataaagaatgcctttaattggatcattaatatttggggacagctgataaaagaatctgagtttgaagatgtgtcaatagagactaccaaaatagaaaggtaaaaagaaaaatgactgaacaaatagagcagaatatctaagaactgtgagacagctaccaaaaatgtaaatacatataatggggaagaagaagaagaagagaaaggaacagaagaaatatttggaacaataatgactaagaatttttcatattccaaatgcagaaaaatcaaagttagggaaaaatatcttaaaaggagcctggctgaagggggaacatctagcctatgaaaaagcaaagataagaattacattctacttctcctcagaaagcatgcaagcaagaaaagtggttaaatagttaggtgttgacagaaaaaaaaaaatccacctagaattctgtatcttgcaaaattatcctttaaaagtaaaggaaaaatactttctcaaacaaaaaccagtagacttttcttgccttgcaagaatgttaaaggaagaacttcagagagagagaaaaaatgatacaggtcagaaaactcagatttatgtaaagaaagggagaacattagagaaagaataaataaaataacttttatttttcttatccttaattgatctagtagataccagtttgttcaaaattataataagaacaatgtatttcattattatagcatgtgtgtaagtgaaatgaatgatagcaacaatacaagacaccagagggaggaactaggaatactttattattattaggtactcatgccaccttttaagtggtatcgtgttatttaaaagtcaacttggaactctcgcatgacattattttgtcttgatagttcaagctccacctgcggttctcccgtcctccatgccaggtgtcaggggctgctctggatgttaactcttccgccccatgacttccagttccaaaatggcggcacagaaacaagctgccatgccacaaccccaccgcgcccctctcccgccaaaaagaaaaattaacaaatatacattgctgagattatcaccagaaattgtcacgatagtccagaactcaaatatgaagatataactgttcccagggccataaggaaatgagaaacaccaagtggatggtaagaaacctgactttcacatttgtagcactcgttaccccattttgcctgacaccaaatatgcagaagattttcctccaactcacttttttctacactggaaaaattaagattgaggtaaacaaccagcttccccagccattctgggttaccggaaagagacctgtcctatccatgcctcaacccactggaagcgtcatgagtgcctaaagggagacatattcctgaagataggcagagacaaagggggatgtaggtctgtcatccccagcctgggaaagtctgctctgtaacttgaccaatgcagacacaatgtcagagtagctgcttagcagcactatgatgcaggaggattatttcactgttctcctcggcacaaacccttaggcagccttcccatactgtcaggatattccctttgggacctctcttgttaagaagggcacaattggattgtttactgaagccaaggcgaacctgggcttaaagcgccccctatagctccctagaggaagcaatttagcagcaaagacatagatgtatgtccacaagaaaaacagcagtaggaaactatgatgtctccaaacagacaaagcagggaaccagggactggccctaacaagacagtaatatgtaagctccctgaccacgaattttaaaatgcagttttaagaaaactcagtgatctccagtagaacacagaaaaataattcagaaattcattagagaaatttaacagagattgaaattttaaaaaatctatcagaaaccttggaactgagaaataaatttaccgaactgaaaaattcactagtagctctcaccatcagaatggattgagcagaggaaagaatcagtgagcttgaagacagaatatttgaaaatatatggtcgaggagaaaaaaagaacacaaagaaatgaagatttcctacaatatatagaaaattattaatacctcaaaaggccaaatgtaagaattaatggtattcaagagggagttgaagaggaaggattagaaatcttattcaacaaaataataacaaaaaattccaaaatttaaaagtatacttggattagttataaatgtatattataagctttatagggcaacccccaaaaaagttttaaaaaggtatagttgatatatttaatacttacaaaggaaagaaaatggaaccatgtaaaaatgctcaactaaaaccacaaaaggtaaaaagtatatagaaaacaagaatagaaacaaagaacaagggcaatgaataaaaagtagtagatattaatccaactatgccagtaactactttgagtgtcaatggtctaaatataccaattaaaagagagagattgttagaatgaattgaagaataaaaccagctcattttataatgccaacattaccctgtaccaacatcagacaaagaaattacaagaaaagaaaaccacagaccaataactctcataaaaatagatgcaaaaattctcaacaaaatattcaaaataaaactattaagcaatgtgtaaaaataattatatatcagaaccaagagggatttatctcaggtttgcaagactggttcagcattcaaaaatcagctaaagtaattcctcacatcaacaggctaaaggggaaaaattacaagattatatcaataaatgtagaaaaagtatttgacaaaatcaagcatccattcatgatcaaaactctccacaaataaggagtagaggagaacatactcaacttaatagaaaatatgtataaaaacctagagtgaacatcatacttaaggataagaaaccagaatctttcctactaagatcaggaataagacaagaatgtttcctctcagcactccttttcaacaacgtattaggaaggaataaaaacaacaacctcatttcaaaataaggcagtaaaggagaacgaaagaaaaaggatatatagaaaatagaaattccaaataaataaacaatcacaacaaatctaaatgtgctgaacatattagaattatgagactgtctggctgaaagagaaaacaacatccacctattgtctgagcagaggctgaattagggcaagagaatgtcttaatcacaaactttacaaaagcaccaaaaacaccctattaagcaagatctataatatttttatgttatatttcaaaaagtcaaatgatttagaaatgtataattaaaaatcaaaattttaagtaaagacacattagtgttgcttgttttatggtcctgtgttattttgtaatgggagctgttgtttctaatcagtccataattcctacctaccagttttataaggttggcatgtacctgtctcatagaaggttttacaatcgtctagaaacagactaggcatgatgggacattatacacagctatttttttaaaactgtagagtgtttattaactttttccatttggctccaaagattggtaaatattttctagttgtatacagaggttcgtatttttcctttgccctcatgctgcaatgcagctcagcatggtacttgtgctgagggtgtgagagacatactcaaaaaacaagcacacttcaagtttgaaaatttaagaaagctagcatgagctacataaatattaggcaaaacagacattactgtttcattaaagaaaaagaggcttattgtataattataaagtataaaattctaagtttacatgcatctcataatatagtttcaaaagtataaagcagaattttatagaaccagaaagagaaattggcaagttctaccatcagcatagaagaatttaatacatctcttattaaaaatgtctttttataaaaagaaagaaaagctacatactagcagttgtcattagcaagacaacacatatataactgacaaaggtaacatttaaattaagcaaactatttgaaaaacagacaaaagaagtgaacaagtaattcacagaagaagccagaagtggcaactgaaatggtcaatatacatgtaaagacatgtgcaactttactggttatcagtaaactaaaaaaaaagaatgtgataatattttatactcatcaagttgtcaaagatggcaaaatctggaaatttcaggaactggtaagtggggactcatacaccacttatgggaaggtgctgctgcactatggaaaacaatttgcaaatgtctacgtggaacactttacagtagtggatatgaaggaatatagctatcacatcaacatgaccagacttctcaaacaatcatactacagaaagcttgttttagaataatacatacactgtatacacttatataaattttaaaatcatacaaatagaaagaagaaactgataaaaggataggaggcaggactaacttgcagctccccctcggacagacagagcagcatgtgaagacacacatcatgaacttttctccaagaactactgcagcaacataccaggaaagccacgagaatccacagatcctttgaaggaaatagattgctgctgcaggctccaggagacagccgaaaaactgtaagtgcccaaagtgtgaaagggggatcttccacccctgaacacatagccttcctggggaacctgaaggtccaggtcacaggtgatggatttggccttacctggagctgagacaaacttagagagctgaacaaaatataagggtaaaggaagcagggggaagagccctgtggactctctcagcccccaggaaaaccatttctgactttgtctcctagggtccttgggtaggactgccagtggaagtggggaaagaccacaaggagaaggaaacttccagatgaactctgtaacaatttcgactgaatgccaactttcctagcagaatctgggggtgagggtgaactgggagtgcagacacagcacagaagttgcatcaggcagggaggtgtgaaacctgaaacccctgcttgcttttccagtggggagacctggagcaggggcaagtcctcagccctgttcacccattgcctggaaataaactcagtgctgttgtggagagtattgtgggagtgagactggccttttgggttgcatgggagctgggtgaggcctttcactgccagctttcccctactttcctggtgacctgtatgatgtagcagaggcagccataatccccctagaaacataactccatcgccctgagaaccacacccccaacactcagagcagcttcagcaaggcctgcccaaggagagtctaagctcagacacacctaaccctgaccctacctgatggcctttctctacctgccctcgtagccagacaaaggacataatctcttgagagctctatggccctgaccaccgcctgagaaacttatccaggagactctagagcaagcttgtatcctccctatgctactgccgttgatgctctcttgaaagcgccacctcctgtctgaaggccaaccaacacaaaactagtgcaataaacaaaaatacaacaaaggaccctcacagagtctacttcactcccctgctatctccaccagagcaggtgctggtatccagggctaagagacctgaagactgatcatatcacagggctgtttgcagttactccccactaccagtctggaggctgctagctccactgggtggctagatccagaagagaaacaacaatcactgcagttcagctctcaggaaggcacatcctggagcacccacatccagggagcacccacatctagggaacacccacatctggggagcaccctgtgggaagaaagaatctgaacaacagcacttgagccccagatcttccctctgacatagtctaaccaaatgaaaagcaacctgaaaaacagttctagtaatatgacaaaacaaggttctttattatccccaaaagatcacaatagcttaccagcaatggatctaaaccaagaagaaaactctgaattcccagaaaaagaactcagaaggttgattattaagtgactgaaggaggcaccaaaggtgaatatgaactcaaaggaatttcaaaaatgttacaggatatgaacagaaaaatctccagataaataaatagcataaataagaagcaatcataatttctggaaattaaggacacacttagaaaaatgcaaaatacactggaaagtcttagcaatagaatccaacaagtagaaggaagaacaccagagcttgaagacaaggcttttgaattaacccaatcaaacaaagacaaagaaaaaaaaaaattaaatgaacaaggcctccaagaagtttgggattatgttaaacgaccaaatctaagaataattggtgttcccaaggaagaagagaaatctaaacgtttggaaaatctatttgagggaataatcaaggaaaacgtccccaaccttgctagagatctagatatccaaatacaagaagctgaaagaacacctgggaaattcatcacaaaaaggtcattgccaaggcacatagtcatcaagttatctaaagtcaagatgaaggaaggaatcttaagagctgtgaggcaaaagcatcaggtaacctatgaaggaaaacctgtcagattaacagcagatttctcagcagaaaccctgcaagctagaaggaattggtgtcctatccttatcctccttaaacaaaacagttattggccaggaattttgtatccagtgaaattaagcttcctaaatgaaggaaaaatacagtctttttccgacaaacaaatgtttagagaacttatcaccaccaagctagcactacaagaactgctaaaagcagctctaaattttgaaacaaatccttgaaatacaccagaatacaacctccttaaagcataaatctcacaggacctataaaaaaaaaacacaatttaaaaaaaagcattcaggcaacaaatagcatgatgaatagaaaggcatctcacatcctaacactaacattgaatgtaaatggcctaaatgcaccacttaaaagatacagaatggcagaaaggataagaactcaccaagcaagtatctgctgtcctcaagagactcatctaacacataaggactcacataaacttaaggtaaagaggtggaaaaagatattccacgaaaatggacaccaaaagcaaacagcagtagctattcttatatcagacaaaacaaacttcaaagcaacagcagttaacaaagagggacattatataatgataaaaggactagtccaacagggaaacatcacaattctaaatatatatgcacctaactccagagctcccagatttagaaaacaattactactaaacctaagaaatgagataaacagcaacacaataatggtgggggacttcagtactccactgacagcactagacagatcatcaagacagaaagtcaacaaagaaacagtggacttaaactatgacttagaacaaatgtacttaacagatatttacagaacattctacccaacaactgcagaatatacattattcatcagcaggtgaaacatcctccaagatacaccatgtgataggccacaaaacaagtctcaatacatttaagaaaactgaaattatatcaagtactctctcagaccaccgtgaaataaaattggaaatcgactcaaaaaggaaccctcaaaaccatgcaaatacatagaaattaaataacctgcttctcaatgattcttgggtcaacaatgaaatcaagatggaaattaaaaaagtcctttaactgaattgtttgatatagtgacacaacctatcaaaacctccatgatacagcaaaggtggtgctaacaggaaagttcatagcattaaatgcctatatcaaaaagtctgaaagagcacaaatagacaatctaaggtcacacctcaaggaactagagaaacaaaaaccaaacccactcttattgacttaataaggaaattaaaaaaagtatgctgagattgctaagatctattataataatgaatcttctatctgtgaaatagtgaaaaaaaaagaaattagtgctagatttgctgtcaaaccacaaagtgcaaaagttacggccgcagtgctagataagtgcctagttcagattgaaaaagcattaaatttgtgactggaagacatgaacagaaaatatgtactatatggaaccaaaatatgtactacatagtacacatagtaccaaacccagttgctgtcacttggcacatagagatctggcatctactggaggtcttcaaatgtattccttgtggaaaacaggactacttactatactactaaattcagatattattagcggagtggaatatatatggcagtatcttgtttctaagttgagtggtacataaaatggtacaattctttttttaattattcataaatttatttttaatatttcagtataatttcccttaaacacaataatatgattgattaatctatcaggaatgtatcacctatgtaaatactcatgctactactaaagacagagtggaggtgactctattcacaatggaataaccattactaaattcatgattactgtgtacatttatagttttactgtaaagattgatcatttgctagctttagtcactcaacaaatatttataaatgccttctatgtgtagtgcattatgctagagtacagccattatgtcttgattacagatgcaagtatttgaaaatattgaaggaccttcatttgtgaaattcaaaaaagattccctggcagacaccaattactataataaatagagatgacttcagtgcaaacaaatgattcaggctaacaattagtaattaacaaataatataaatagtatagacattttaaatcttaaagaaaaatttaaatgcagcaatacttaagaaagggttttttaatttactaatgtagtaatcaagtctaatactacaaaaaatttctaatatgaaataccctttatatttaaataatcaaataccttgtataccagttgactaagtttagaggaatcttaaatattaaaaaacatcaataacgccttatacttcttagtatgtgaattcgtatttgtatgatgtatattattttggagagttgcctgtaagcaccatattaatataatgaatgaagcttttcttcattgaagtcctttgtaaaataatgcaggttatcctgaataaatatggtctctattccaggccatatttcctggaatatcaatagggttaaattattatggttgcaataaaatagaattgctttatcttgtccactatctacaatcttgaataaactttaaaatcctccttctgttctcttaagggaacgtggtgtgtccccatgtgtcttttttatttagtgccctgaacaatccataaataagaggaagaaggaataaagaaggacagagatttcaaaggagaaatcaaatacctaacaacatgcagtattgaaaattaacaaataagaatgcaaggcctctcatgcaaatggttccatctcattcaaccactagacataattacttctgtattcacaaggcctacagtaaggaaatactgtttaaaaaaataggctatcaattatatttatatatagacaacatgtagactgaaggattatccgaataatcctgcctagagtttctgtttttctaaatataggttttatgtcacgtattacaatttgtttcattggataattttccaatcttccatttcactttacccatagaattagactaggcattacttgaattagaatgtttctaaaaatagccacttatattaatagttgaaatattgaagtaactatgtatgatgtgtttgtcgtcattgtattgtcacctatgtttgatcagtattgtccaacagtattagtagttatttattttatgctattaatttcagtatctagagagtgagtaagtacattgtatctgtgaacactttaattatgtaagaatttctagccaagggaaagataattactgaaaaagggatatgtcattgaaggataaacacgtggcatttctgtcttctcagtggtaaagaatagtatttgttttggcttttccaattgaaattacataatctgtaggtaaaaattcacaggtgaagtattattgcatttgcctttaaacctttaatgttactattcaattaaatgctagtcacattaaagtacagtcctgtaatgtgtcataaatgcaatgagtctgttaggacattcactcacacattcaccaaatatatatgatcacctcccatgtgcaaagcacagagccattttctgtctagattctctatgtagttgggcactttatctgtgttcccctctgaaatctatcactgataataaattaacaagtttgtctaacattacctttgccatgggaacattagagctacctagggacacttccattggaaaaaagatacctgagtacactaaagtttttatgtttataaagatgatttctctacctagtagacaaatcacagtgaaactggatcctttgaattaccatggaattgctccagccagaggaaaggggaagccttgaatagagccggaggacaattactattattagagatttaggctcttaacatttccaacatagggggctggtttctactgatgagaaagggaaaatgtacagattttcagagggtctgcaattcattcaggccatctgggaatagttaaaaaaattacctcttttattcagtgagcagtactgtaacagtactaaaaagtgatcattttataatctttcactttgaagcagattgtctttctctccttctcacataggcagtgctgcatccatatctctaaattttatagccaggagtggaataactacatcttttggtttctagggctttgctgtccagtttagactcagcagaaagtaaagatggactgagccagagtgactccagtcaacacctctctccctcgaatactattttcggtccctgaagccagtataaacatggagattagaagtgaggtctttgaaggaaaacatccagatatataaattgagtacctactatgttctagggctccttctaggcacttcttcaacatattgaagacaagttgttttcgatgactcattgtgatcattatgaacttaagcttccaaaggtcattgacactgggagctctcaggaccttgaagggaaattttctccctagcccccagccttttgcaaggacttcatatatctttgtctaagaggatatttttcttccttcttttttcaaagatacatagtaggcatttaagattgttgtataagtgactgaataaataaattgctcttgcagttaaattacttaaacttgtattttacacaagtttctactttctctgtaaatttgaaggtgttaagaaataagtaaaattgagtgtgtggcttgtcatggtggctcccgcctgtaatcccagaactttggtaggccgaggtgggcggatcacttgaagtcaggagtttgagacgagcctgggcaacaaggtgaaaccctgtctctaccaaaaaatacaaaaattagctgggcatggtgatgtgtgcctgtagtaccagatactcgggaggctgaggcatgagaatctcttgaacgtgggtggtggaggtttcagtgagcccagatagtgcctgggctccaacctgggcaacagagcaagactctgtcctttatctccaaaaaaaaaaaaaaaaaaacattgagtctatcaggagtggagttgataaaaatgctttggagactatgggttatctttgaaagattgtctttgctgctctgtaatggtaacgaagaaacactatacttcagtttaatgatccataagaaataactgtcattgtgtattattagaatataatgtaataaaataaatttcatcagtgtcttctagattcaatgactattcaatgattttcatacctgaacatgtcaaagtatttggctgcaacttagcggagttgattagtagcctttaagaagctatcaaaatgaaagcagttaaatgaatcagtggtaaaggtccttgaccctgatatagccattgtctaatctcataatttgggcattcagggacatatcgggggaatccagttgttacagaagaaaccgaaacataattgaaagtgacaaatgatcaactggagattgggaaaacatgaaatagaaaaccatttgcttcaggagctgcctaaaatataagatacacacagagttcttgattttaaatcaaactttaaaatcactggtagaaaaggcagttgaaaattatgagaattcaaaaatttacttataatgcacttaccaattattatttcttccattttgtcatggttatccttgtattatctgaaacgagttgttaagaaccaattatgggaccaagaatttaatacttcatgaaactttataatcaaagaatagactacaaagtattccttctgtctttgcaaaccatacaaaatgataatagaacagtatcatctttaggatcaaagacccaaataggcattggtgtgtcatttagttgcatatgtcttaaatcaaattttaaaacaaatttaggcatcatctctcaaaatctttgcttctgtatattaatcccattgttttggaaaaaatgtatattttttacaaatcatactctgtttactggtggctcaaaaactttttagcttacatagtagttgaaaagagaatcattttttctgcagatttttgctcatctgtgtgtaatttaaaactgaaacatattaattttcttaggttttcttagtgaaatgttacatgcaaatgatgtataattatcttgtaactatccatgcagttacattttatttgctctcaatttttaatacattagtaataaatgtacactgtggaaaaaataaagttataaactttatctgtaaacctaccacccaccggtaaccccagccaataatcttagtttatatactttcaggcattatattattgttattattagtaaacctgtctcatctgtctctatcttcttaaaattgcatatttatatctatagataagtccacctttatctagaatagaggattatactctgtatattatttttaacttgattttcaattcaagctgtattatgaatatatttctctatttatatttataaatgttagcctttttttttttaggaattggaacatcttaaaccactctcttgcttttgggcatttaatttgtttccttctcttcagtattatcaacaccccattattaaaacagaaaatctttatcaagcagctttaaaaacatattctcggacaggcacggtggctcacgcctgtaaacctagcactttgggaggccgaggcgggtggatcacgaggtcaggagatggagaccatcctggctaacatggtgaaaccccgtctctactaaaaatacaaaacaaattagccgggcgtggtggcaggtgcctgtagttccagctactcgggaggttgaggcaggagaatggtgtgaacctgggaggtggagcttgcagtgagccaagattgcgccactgcactccagcctgggcgacagagtgagactccgtctcaaaaaaaaaaaaaaagtattctcctaaattctcagtggaatttctgggtcctgtggaatgtatacatatgttgctcctcctaaaaggagtggataaactcctctcctacaagcagtgttctgcactggccctttctacaaattcctttcaccctggtattatcataatctaaaaaataataatttgagaatcaaaaaataacagctatgcttgttttcttcaggaaaacagaacaggttatccatatatctgcagggtttttttctccacaaaagaaaggccagccattttcaataacaagtagtttggcaggaccagaaccattccattgggtcactggtaaaatttgtctttggctttaaacattaaggcagccaggactgtgtctttggacattgatacagcatttagtccagtcttatttacaattaggctttttgataatggcttttgggctgacgttaagtataaaatctgaaattagattttttaaagattataatcaaaaagcaaaaatgtcttcctagaaatagcaaaggaatgcttttgctggatttgctccactaactcatgtaggcaatataccaaactcaaacagccagcagttgttttgtaaaagacaaactgcatctgaaatcagtatgacaggaccacagtttccatctcatcacttccaccaacttacatttaagaaagcacaacttgaataataaaaaccaccatagagtaaacaaattcttcaatgagaatgctttgaagtcaagagaaaaataggctcagggcattgtgttacagcaaaattttgcctttggcaaaagttttacgatggaatagggtttttaaaatattgggaatcaggtaaattgcatggctaattgaactggggaagacagcttaatgagctcatttctctccttcaaatccaagaagtcagaaggcaagttttcatctattctttcatttatccaattagaacatatcgtccccacacatagggctactagaagaagtaatagttatgtctgatggctcttaggaagtattgtcaatagataggacctcctctgtagttataactacagatgatcaaattaaccagaaataaattttggtcataaatttcttcttgctccactctgtaggctacctcctccaaagcagatcgtagaccagtgcatttataaatcacagaatcaccttttaatggttatagactatatatagcatagtgacagtcatatactgctggtgctggtcaaacttgagatcaacaattctgttggatttttacccctctcttccttctttttcctcctcttccatattctgactttcaggtttgagcatgtaataacttccaggatttgttttgggcattatttatatattaccacttatcctaagattattttgagtcagataaaagtaagacattctattaagttatcttcattttgaagatgaagaaactaagattcatagaagtaaagaggactctaggagtaactaactgtccattgtcattgttaatgttacttaacctctttaatcctctgtcgtgaatccaataacgatcaaagtagtaggcaagtttgctgagggccaactgtgtgacaagcactttgataactgattggtctttacagcaaccttatgagagaagtattattactctcatattatgagtgagaaaaataaggattaaagaggtacaggcaattactcaagaacacagggctagcaaatcaagaaacagaagttagatgtgagatattgtatcacccaggcctaaaagatgcaatgaaacaacccattttaaatgtttaatatagtaaccagagtatactctcatttgatgagagtatactcatcaaatgagagtatgcatttgatgttacttttcacagtggcctttttgcagttaggaaacagcagcaccaataatagaactaagctgtctgactcccagcctgtacctaaatctctaacttttgattttatgaaataaatttgatttgcagatgggcattgctggtgagggaaatgtaaagaggtcaatttccccactttaaatttttttggctaaagacccatagctgacaatattttaatggttgccacatattcttcttttatgaagtgagtttcattttatatttgtaagtggtttttattgcaaatcatcacctaacagtcaattctgaagactttccataaatgtcaccttgtttgtgaattgttctcattctgtctcctctctaaattccctcaagaacaactttctttggacattaatatcattattaattgtgaattgtcagctaacagcttagcaattgtctatcatgctcctaatgcatggatgatacagagaatataaagtcaataacttgtatttcctgaaagatacatatacagaagccaatcatttcagtagagtgacaggagcaagattgaggtattaatagagtactctgagagatgagaagcgggacaactaccttagcctaaaggtttgcaaatgattgtggggaaaaataatctttatcactccaaaaagaatattacagtgatattttaattgaccatagagtttaacttgaccattgtaaaatgaccaaaagggtgaattattttttaccaattattaaaaagtagcactacctgatataaacagtgtgacctaatgtttacattcttattattttttctcctttttgtctttttctctctccccagctaagtagaaaaaactcactttgttttcatgctaaaattttggaataccattaaacagcaacacactggacaactacattcttatgttttatcttctccctttaagattgttaaaggaagaaattgaactagtggggaaaagtaaatactggccaaaaaaaaatgcttttgactagtgtatgttccaatgatgattatgaaatatgtcaaactgttctaaaatactaaatatgtgttactatttattctgtattaaaatagaacaatagaataacctttgttgtcccaatatgaaaatagtttttaacaatgttaatataaaacaaagagcaaaggaccattatcttggataaacagagagacattactttacatggtttgactcccctgattcataatttaacatgtaactctggcatatgctgggcacttagggaagtcacattaagtatttcacagcaaatggagagtgagaaaaatgattttcagaaatcctggtatttacttattataaatcttgtcttgaatttattgtactttacatgaaatataatttgataaaatgtaattggtttcagtgtgtatgcaaaatgagaattttctgatcattcagatatcaaaattaactttataaatacaaatacatataattacctattaaaattctaaggtgtatttattttaataaaagtctttatcaaacctagataaatctcatttatgattataaatgtaaaactcctaaatttttttttacttggctttatttactattaatgatgttgggtttattaaaaaatgcaagcacagactccaattagcctactaacctattgtataatttatcaattcaataggtcaaacaattaaatcagaacatttaataaaattgacaatatttttttatttttttacaaaaatccatattggttgttttgaagtagcaatttcttcttcaaaatgataaaaattgtctatgtaaaatcaatagtcaatactataaaagctgcaacattatagacattttcattaaaatgagtaaaaagataattatgcctatcacactactataccatataaattaactattatgctgaaaattctggccaataaagtaggggaaggaaataaatataactgtatatttaaaattatgaactaaatcttcactgttttacaggcaaaggaaaattctaatatctgataaaatctttaaagtcaattaaaaaagagtatactaaagaaaaatgaataattttctcaaaaaggactatatctaaccaagaactaggtgaagattggcattactagtatccaaagacataaatactaaaacagtaattgacatattatctaaaatcaaaatagtgaagatataacaattatgggcagaacacaagaaaatggacattctcagatattgctggtgtgagtatgagtttaatttttctagaaggaatttgaccatatttaacaaaatctttaaaatgtttatactctttgataatgtaatttcatctcataattttcttaaggtaatacttagatatatatccactcccgatccccaaaataaaatggaaaaaaaaaaactaaatgtgtaatgattgcagaagggttgaatgttattttatgagaaatataagaaataatgcagcaaaatacatgatgtttaattatacaaaactatgtagtaatacaaaatatatgatttttaataacacaatacccatgtatattcataattttgaaaagaagaaatatatgcatatacaaatttgaaagaaattatctcatgttgacattttgacttatcatttgctagtcaaattaccagtgcttttaattttctacctcctgcctttgttttataaagaatatttttattatgtctatagttatactaaactcagttcagttgaattgttatttaaatctatggaaaaaattttgctttgtccataaattgtatttatattagaaagttaaaataattaattataaaacatatatccaggtttttttatttgttccagtacataacagacctattacataatttgagtaaattttgtcttacagttatacaggcagttctctccttacacaattctgatatgcatgaatatcagttatcatagtttagttaaatgctaacagtcctccaacaacgtaactcaagtgttgggtaacattgaatattactgtgagtaattacataaacaaacattgctgctggctctgcagtccacaaattaccacataaaataacagatgcacattgtgatcagtgaccgatcacgtttatttttttcagtatctgttggtgattgcgcactacacatttatcattcagtttatttatagaagagaagcgtgtggttgtgttgcctccttgtgagtgataaacccgagtgacactttacaaacacagatattcaaaaaagaagaggaattggacagcaaagaggaaagcactgcaaagaaagaaaatacttgaagtaaaattcagattgaacctaagtggagtcatagaagaaatagtcactactgaggtttgagagattctgaatacgtagccagagctacttagtgaaggtgaacttaacataagtgagggaagtgcttgccacaaatagggtgaagatgtcctggaggaagtgacacccaaacacttcacattagaggaattctcacaggtacttcacaacactaaaagcataaaagttaaaatgttggaagctgattcaaacttagaaaggagcgtgacaattcaccaaggcatagaaaagaagtggccgggtgcggtggctcacgcctgtaatcccagcactttgggcggccgaggtgggcagaacacgaggtcaggagatcgagaccatgctggctaacagggtgaaaccccgtctctactaaaaatacaaaaaattagccaagcgtggtggcgggcgcctgtagtctcagctacttgggaggctgaggcgggagaatcgcttgaacccgtgaggcggagcttgcagtgggcagagatcatgccactgcactccagcctggggaacagagtgagactccatctcaaaaaaaaaaaaaaaaaaaaagatgcttgtgttcagtgtgataagttataggtgagatgaaggcaagcactgttcaaagtacttttagtgagtattttacaaaggactaaaacaacttctccaagtttttaatgttttaaattacagagtactaaataaatggtcatttttactggtttatttctttacatttataaccagcattggagagttgttaacatgttgaagttttacaaagtcttagagctatcataacctttcctgttgattattaagatcactttgcatgtttgtaacacaaaggttaaacacttgaggggatagatgtcgcattttccaagatgtgatgattacacgttgtatctctttttcaaaacatcccatgtagcctataaatacatacacctactacgtacccacaaaaattaaaaattaagaaaaaaaaagatcattttccatggttcaagtttgcatggtcacttttacaattccaccctaccatgcccgtaaatatgctatttctgacttacgaaatatttttcaaataaaatcattgctgacttttaactcactgatatgtgctttacttctggtgaaaggcctaacatatcaataaaatgaaagaaaatcacagctttattttctttactgttctgatattttttgttctagtgtgatcgctgcttgcctctttataatgacaagcctttccgccaaggtgatcaagtttacgctttcaattgtaaaccttgtcaatgcaacagccattccaaaagctgccattacaacatctctgtagacccatttccttttgagcacttcagagggggaggaggagtttgtgatgattgtgagcataacactacaggtaagtagcaaataaattcctgagttggtttggaggcctgtgtgcttctatctacaatgcatattattttaaattatgttattgctatcttatttaaggatgtactttcatacctttaagtttgaaaatcaaagctagttcaccaaatcttcctatttccaaatcactaggtagttttcagaaatagcactctagtcttaaactatatcttttcaggaaaaggattttgttgttgttgttttgttttgttttgttttttaaagagttcacaccatttgactaaaccacaaccatatttagaataactcgggaatgcttactttgaacacatatccttaaagtaagtttccttttgtcccctttattgtcctttatgtctggattctcatgtggagatggcattcattcagatttggcatggacactggtagtctgagaatactctttttgaaaatactaattaaatggagacgatgataatcaaagtcctgttctaaaactacaaagcctttgactagtcattgaaaaataccatccttattttgaaaggcaagaaatggccaacatctgaatttgtgaaatataatagcatatatctgatgggtttcaaagtggtactcttaagcatgaatccatttatcggctgattattgataacttaaatatcacaagatcttgggtaggtgctggggacatgaagatgaataagacaatgaattttctgtctttgggttattgtacagtgggaaagacagactattgaaaggaatgattacaaagttgtctgatgattgctaagatagggcaaggacagtaggagttaaccagttgaaagattaggatggtgaactaaggcttacaattagggaaacattttgtgcagtggcctagaggagggagaaaaatgacacgtttgaaaaaccataagatgggcaaatggctggtggtaagagatattaggaaggaaggcaggacaatatcatagaggactctggagccatgataaagcctttggcttttatctaaggtcaaggagatgacacttaagggttttatatgggaaaggggcataatgagttacttgttattaaaagatacacctggttataaagtaaaaaatggattggagaaggttagagtggttggggaaaactagttagtgaggtgctgcaatagtccaggtgagaaataatgtcagaatacatttcagatggtacggatagagagaaatggatccaagagatatttaggataaaaaagtgagtgttttgtgagcagagtgtaggcaagggaaggaaggagagccaagactgatacctaacattacattctagcttgagcagtaggctcaacattggtgccagccattgagatagaaaatacaggaggattgagatgagggaggagatggcaagttctgttgtggatatgttcactcggtttctaagagacataggagaaactcctgggggcagttggaaacacagttctgaagctctttccttcaaggaaatcctctcatgatgctttagagaagatcagaatcacttacacatgttagtgacaactatgcttatcatggtttataaatgtgtattactcctggtattatttagttcagattcctcttacctcctagactgtaagagagctttgtgaaagagatgcaatgggtattgtgtatttagtttactactgtattacacagcacttagcacagtatttggtacatagtaatcacgcgataaatattcattaattcataaataaaagagagatttctggattggagatatggatttgggagtcaacagcatatgtaaatggaaatagtctagaaatattataaatcaatttaatttttaactagctcaatagccaatatctatcagaatatgagttttcatattattgattattgattatttctgtagtcttcaaatattggagaaatttcaatattttttgagcaaagtacatcatgtttaaagggggaattgatagtcttgagttctacttcagcttatttcaattatcttatacactagtcacgttcactttaaaaattccttgtagtttaggttttttattacataatatagcaaaggaaatttgtaattataaattataaactatgggaattacctgatatatctaatatgtcaggctattctagtatttagtatgaaaagtacttggtatctctaaatataatgaatttctatttcaatctttgaaatgaaaaataatggccactaacataatcatttgtttttaattgtgttaactacagaataataaattatattaagagaagtctcccattttacatgattgagttctagaaaaatatttccaatactacatacctgcttgcttcttactgtataagtatcatctaccacatatgtagaaatttctcctgctgtattgagtttagataaagtgcctggccccagatataaagttttaagtttaggagcaaactctttccaaatgtatgggcccctataaagcacagctttttagaagtgtggtattatataacagatgggagtttaatgaagtaaagcacagtttgtaacaggttcattgtttcatatgctctggatcactaaattggcaggtagagatgaaaggtgcattaaaacggacgttccgaaaattatagaattccctcaaaggaatacagtctttaattttgaattatgcagctgattttaatgaattagaagtcataatgcataacctttccctgatgcaggaaggaactgtgagctgtgcaaggattactttttccgacaagttggtgcagatccttcggccatagatgtttgcaaaccctgtgactgtgatacagttggcactagaaatggtagcattctttgtgatcaggtgagtttttctgagtatttaaggtaaaggattactctgtctgccagaaacttatttggatgttattccactagtagaattgaagactgcatttgccaggaaatcctctatgtgcatttgcatttcaaagagatggttgttcgtgtgcaactttgagtatggacatgaaatatagcactagttcggtggtcctttgcatataaaaaggcttattttagttttaattttacaaatgtcaaaaaatcgaagggtaggggttctaagtaaattggggtatatgtcttggaattattggtgaattaatattaatacatgatataaataaacaagaatagtttctccaaaaattccatagaagatcatatagcaaaagtcacttacacttagggccaaatggaaattatgatagcctcgcttctcaatttcttagtctaactttccctcttaaaagtacaatggattttttataattttaaaactttctgtttacttacatcacaaatatcgatgtctagcctacatgcacacagattctaactaacctcagttcatgtatcctacctcaagcaggaaaacaggcttcttattgaagctgaagtttttcctgttctgataatactaataagtgaaaattgtgaaaatcggtaaaggagaaatttactttgaagaatcaattcaatgattgtattaattttaaacagttatatactctgttatgaataaataaggctaggagcataaaccacaatccagttatagaatatttgttaaaaagttatattgtgaacataatacacacaagacaaaatatctttctcctataattttgagaattcattaaaaattgctttcccaaataaaagacaaatataaaccaagacaaaatatggattcaaagaccttcagagtaaccatcatgtgtcaataagggggcattacatgcttcattagaaagctgaagagtagaaaaattattaataaagacaatttctactatttttattttataatattgagggactattttctcagaaagtcatactacagttttccatatattaattagtaaactctgactgtatctttagattatatttcatttttacacatccaccctgagttttcagcatggctatcttttgcttatcattcaaatattgatatatcatattttgagatatctttgctgaccacccaattacaaaacattctcaagtctttcatatcaccatgttactctcattacaggctctgtaaaattaatttatttgtttacttttcttcttctctctttccaacataaacagaacagtttcgatcatataaaaagcccccaataagtatttgtcacataaatgttgaatgaataaagagagattatctgagcactgatcttatagttagattgttattttaaacggtcattacaataatctgagcattatgtaaattttcacttgcagaacagtttttctccctgaaaatctaaggtcaagagctttgttatatagtataggaagactgtaaactatagttttacctcccagaatctcagttacgtgtctaacctacacgagttacagtgcatcagatttgtctctccatttcaccattcagatctacaagaaattgaaacctgatttttctgaactcaaacttctatttcaagtccgttttatagggatgctagacaaccttgggtggttctgtgcttgtaaataattaacaactgactaagaaaaaaaaaaggccaccataatcaatttcaatctaccagtgagatgtcactgaacatggatttcagaagaaatgtacttaatctgctcttatgagccagtgcagtgtactccagcatactactggctctagatttctttcttaacatcttataaagtggagctaattattggatggaattatgaaagactgtaccatttataagcaggatattagctgtagatagtgttattttttaagttggagaaatttttctctattcctagtttttctgagagtggtttttatgaatggtgttgaattttgtcagctgctatttctgcatcaattattatgatcatgtgatctttttttctttagtttgttagtgaagtagaatacattggttgcctttcaaatgttgaaccagcattgcatccctggaataaaaccacctttgtgtgtgtctttgtgtgtaattcttttcatatattgttaaattttatttgctaaaattttgctaaggattttacatctgtattcataagaaatattgctctatggttttgtttttataaattgtgtttgtttcattttgttattaggataatactctcgtaaaatgaattataaaatcttccttcctgttgtttttctataagaaatgcagaactggtgttaattactctttaaagtttaccccattctaatacatagtattctagtaaatacagtaccccatgtattagtccatttttgtactgctgggaagaaatacccaagacagagtaagttgtaaagaaaaataggtttttatttatttatttatttatttatttagagacagagtctcgctctgtcacccaggctggagtgcagtggctcaatcttggctcactgccacctccacctctggggttcaagctattctcctgcctcggcctcctgaacagctaggattgcagatgctcaccaccatgcctggctaatttttttcttttttttgtatttttagtagagacagagtttcaccatgttggctagactggtgtcaaatcccacccacctcagcctcccaaagtgctaggattacaggcatgagccaccacacctggccagaagaatagatttaatggacttacaattctacgtggctgggaaggcctcacaatcatggctgaaagcaaaggagaagcaaaggcatgtcttacatggcagcaggcaagagagaagtgccgagtgaggaacagggaaagccccttttgaaaccatcagatttcatgagaactaattcactatcattagaacagaatgggggaaactgcccccatgattcaattatctccacctggttcctcccacaacacatggggattatgggaactacaattcaagatgagatttgggttgggacacagccaaactcacacttggcccctcccaaatctcatgttctcaccattcaaaacaaaatcatgcccttccaagagtcccccacagtgttaactcattccagcattaactcaaaagttcaagtccaaagtctcatctgaggcaaggcatgtcccttctgcctacaagcctgtaaaagcaaaagcaagttagttacttcctagatacaatagcggtacaggcaatgggtaactacacacattccaaataggagaaattggccaaagcaaagggcctacagtccccatgcaagtctgaaacccaatggggcagtcattaaacctcaaagttaccaaatgatctcctttgactccatatcttacatccagggcatgctgatgcaagaggtagctcccacagccttgggcagctcggcccctgtggctttgctgggtacagccctccttctggctcctttcacaggctggcattgagtgtctgtggcttttccaggcacacgatgcaaggtgttggtggatctaccattctgaggtctggaggatggtggcccccttctcacagattcaccaggcagtaccccagtggggactctgtgtggggggtctgaccccacatttcccttccacactaccttagcagaggtacttcattcattagggctctgcccctgcagcacatcctctgcctggacatccaggcatttccatacatcctctgaaagctaggcggaagttcccaaacctcaattcttgtcttctgcacacctgcaggcccaacaccatgtggaagctgccaaggcttggagctgccattctctgatgcaatagtctgagctgtatgttgatcccttttagccatagctggagcagttgggacacggcaccaagtccctagactgcacacagtgggggggccctgggcccatgggaccattttttcctcctaggcctccaggcctgtgatgggaggggtgatgagacatgtcctggagacactttcccccattgtcttggtgattaacatttggcttcttgttagttatgcaaatttctgcagccaacttgaatttctctccggaaaatgtgttttgcttttctactgcattgtcagcctgcaaatttttcaaacttttatgctctgcttcctctttaacacttactacttagacatttcttccactagataccctaaatcatctctttcaagttcaaagctctgcagatctccaggggaggggcaaaatgccaccagcctctttgcatagcaagaatgacctttactccagttccccacaagttacttatctccagctgagaccacctcagcctggcctttattgtccatatcactatcagcattttggtcaaagccattcaacaagtctccaggaagttccaaactttcccacatctttctgtcttctgagccctccaatctctttcaaactttcccacattttcctaccttcttctgagccctcccaactgttccagcctctgcctgttacccagtcccaaagttgcttccacttttttgggtgtctttacagcagcgccccactacccagtactgatttattgtattagtccattctcactcaactataagaacaaacctgagactgggtaatttataaaggaaggatgttaattgacttatagttcctcagggcgggggaggcctcagtaaacttacaatcatggcagaaggggaaacaaacacatccttcttcacatggtgacagcaaggagaagtgccaagtgagggtgggggaaagttccttataaaaccatcagatcatgtgagaactcactatcagaagaataggatgggagaaactgcccctcatgattcaattatctccacctggttcctcccatgacatggggattatgggaactacaattcaagatgagatttgggtggggacacagcgaacacatattgctccagtaaaactatctcagatttctttggaaacagaaataatttattattaattcaaaattaaatactacatatatatgtacatatatgtgtgtatatatgtatatatatagagagagaaagacagagagagagatacaaggaaatgagagtcatattaacatcattaggaatttaatattactagaagacagttcagaataaccttaaaatcccaaaagaagacattttgaagaaaaacttgatactcagttctatccaagctatggcaccaacatgaggttaagattctttttgtacgagagatggtcaaaacattaccattcataaccccatattaaaatattcaatatgcaaagtgaaaaaggaatgtaagactggggacaacattaaacaaaggaaatgacaaacaattatgatccaaagaaataaatacataagtcaaaaaatattttcaaagtatccattggtctttatggtctgcaaggatagtttccttacatacatgtttagtaattcaattttatttaagatcaaatcacaattttttgtgatttgagataaacaaataacaagtagagggctaaaaatactatatccaaatatttcagtgagaaactggatgcttttttcctaagatcaaaagcaagataacaatatcccataacattgtactgaaagttgtagccaagaaaatgaaataaaagacattgagactggaaaaagagaagttatttgtatttgcatatgccattatcttatagatagaaaatcctaaggaattaattcaaaagtattaaaactaataaattcaggctgggcgcggtggctcatgcctgtaatcccagcactttgggaagccgaggcgggtggatcacgaggtcagcagatggagaccatcctggctaacatggtgaaaccccatctctattacaaatacaaaaacaaaattagctgggcatggtggtgggtgcctgtagtcccagctactggggaggctgaggtgggagaatggtgtgaacctgggaggtggagcttgcagtgagctgagatcatgccactgcactccagcctgggcgacagaacgagactacatctaacaacaacaacagaaaaaaacctaataaattcagcaaggttgcagagtacaatatcaatacacaaagatcaattatatttccatatatttgcactgaacaatctgaaaataaaattaagaaaacgtcttttaaaaatcaccaaaagattaaaatatttagaaaaacatttagtaaaagaagtgtaaaattatattctgaaaaccataaaacattgctgaaataaagaagaactaaataaatagaatgacacccaatgctcatgtatcagaagacttaatattattaaattaacaacactctccaattgatctacagatttagtgtaatctttgttaaatgcccaccttacttctttgcagacattgaccatatgatcctaaagtttgtatgaaattcatgggactcaaaaatgtccaagataaccttataaaaaaagagttggaaaactcacccttcccaatttcaaaatttactataatcaagacagcatggtactgggataaagatagacatagagacatattcactgaaatagaattgagaatttacaaataagccctcatatttatagtcaattgatttttgacaacagtgccaagacagttcagtggagaaagtgtagtcgttttaacaaatggtcctgggacaattgtgtttttatatgcaaaagaatgaacttggactcctaccccacctcacatataaacaaattaattcaaattaaacaaaatattgaatataaaagctaaaattataaaatcttgagaagaaaatgtagatgcaaatcttcatgtcctcggattagccagtggctttttagatatgacaccaaacgcctaagaaacagaagataaaatgtgtaagttggacttcattagaattaatatttcaaagcacaccaacaagaaagtgaaataaacaacccaaagaattagttgcaaagtatataataaatctgtaataatgaagaaaatatttgcacagcatatatctgataagaagcttgtctagtatatatgaagaacttgaagtgaataatcaaaagacaaataactcaattttaaaatgcgcaaataatctgaatagatatttctctaaggaagatataaaattaccagcaagcacataaaaagatttttgacattagtcatcagggaaatgcaaatcaaaactactgtgcaagcccacttcccaaccagtgggatgactgcaactcaaaaaaaaaaaaaaaaaaaaaacagacaaaaacaaaatttggtgaggatgtggagaaattggagtcttctcataggctgcctgtgagaatgtaaaatgtgcaccgactttggaaaatggcttagtgtttctcaaaatattaaagatggaattaccatataacccagaagtttcactcctctgtatgtatcatatatcctcataaaatcttattggtgaatgtcaatgccacattgtttgtaatagtcagaatgtccatcaactgctgaatgaatagataaaatgtagtataatcacacaatggaatattattttacattaaaaagaaagaaattactggtacctgctacaaaatgtgctcaagtctcagaaattagagtagggaaaggaagacggacgaagaatagagaaagcttgttttgttttgtttccaagtgcaaaaatctgttttaaaaatatatggaaggaaagacatgctttaaaatgttaacttttttggttttaaaaacatttttccttttatataaacttttttctctttccaaatctgctttatttataacttttatagtcagaaaaaaaggagaattttcattcaacctgatatatagccagagagaattacacataagaataggaatgtaaataagaatgatagaactgttttctgactttaaacccccacattgtttatctttaaatcacattcatatattatcttaatttttattattttctcatgctccaagtatagagacaaagtttatggagtatcgttacatgtggagatattgtgtcaagtctaccttacctaaataatgttataaaagatttcaaaaaatgtttccagacattgtcaataggataacagaacacacacttaaaaagttgtcaacagtgtcagaattataaactgcaaaattgaattcaaggacatttaaaaaattcatgcaatttcaatccttaataatattagggagcacacaaggaaattaggcagtagttcaagtctcattttgttataataacttaggaatgaagccagccccaaatggcctgagtgactgtgtcgtgcgctctatgttctggaagggaactttccctttggcacttgtcatttgaaactcaatccaatctcataagatatggcatgtttgccttattcttccataagaaatgttgtaattcttccttatgtgaatgccaaaatcttgagaggggcataaagtaatgctctgagtcactgaatcctaaaaatactgatgccacagtcaagacagagagaacatctaaagcacagtactaatattaataggagagaggaaaatgaagagtaataatgattattgaggaataactaacatggaatccttggatcccttgggttactatatgagtgtatattttatgtctgtataaattgagtaggatacaatttatgtctgtgtcatacaactgtaagtctgtgtatttttccttttttttttcttttgtctgtatttttgagggtgagagctttcagtactttcatcagatccaaaagggatacatgaaccaaaaaagatgataattatttcaccatggaaaagaagtctatcttatgaacaggctgggttattagttcaggtacatattatgtgagtttttcaggataccactgcacttccttcttgtttgcttgaacttaatgcatgaattacttgacatgcatcctgagttggaggttaactgtccttttccatttcctcatctagtgtgacttaagttcagatcaatcaaatagagtcccaggcctagatgatgcctcttctgtactttgacatatctggagaagggtctgtgaatccacacctaaagtgcatacatctagagatctcagtctgatcctgacccaaggtgggagtgagccgcttgtctccatcctttccctccactgaccccactcctccacatattttctggtagccccagagtccctgctatagccacctccacaggtgatggtgataaggtagggagaccggtgaaagtccctaacataagtccctagcatatggcctgactcatgtagaatgcattcaagaaatattgtctgagtgctttcttgcttgggacttttttcatccctgctaccttctctcccgtttactttgcttgttattgggttgagctgaggaagccatgggggttcagccactgtagtcaagatggtggtcatcagctagggtagtcctcaaacttttaatgcacatgtgactatcctaggtatctttttaaaagacagattctcattcaggaagtttggggttggggctcagattttacatgtgtaaaagttcccagatgatacaattgccgcctgtctgtgaaccactttttgataaccaaggagttagaacactgtatatcaaagatatgtagaccaaagaagctgaatgtagatgggggtaggggagttgtgagtgtgtactcacgagcacatgtatactcttggtcagttgtgggtttactttgctccatcctctgaatcccatcttaaaagcaaggattttccaagtcatccaaattaagttaggcttgaattgtgccctgggctctacctttaaaattagagtatatcacctaatagccatttttaaaaggaaataaaaacaacaaataagggaattaaaaagttgtgtgaaaaccaaaaatatagttgtaattatataaaaagagagaatagcagattgtaatgctcaataaagcatcaataggttactgtaatagcaacagaacagaaataaatgattaagagatatttaaaaatagattaataagaaaggaaactgaggttgaaatgaattagacgaaatggaaaggcatcagtgaaagaagcatttctaggtctgacctatggaagatggaataataaggaacagagaccctactcatgaaaattgattgttctggtgaagtgataattttcaaaacaatacatttaaaatttgaacagaatatactttctctgcataatgtaccatttttctgcagttcattaatggtttctcttctgttcagaattaggtatttgtcattaattaccataacatgtccaaaagtcatcaggtgaacttccctgaagtatattcttatattttgtatgactcaaatattaaagtgtacaaatagaaaaaataagtattgcataagtttccttagcttatgagaaacctgaccatgaatagtatgatccatggatattggatgtatacattgaggtggtgaaggatgtgaaaagaggagagttttcccagagcttcaatagagacagaaaggtcttggcacaagccacgtggtctctccttcagagaattagggaagtttagtagtaatatttctcatagagctggtaaattgagtaatatctcattattctgagattgtagaggatgagattcacaaagacaggaacaaaggtcctggggtataaatgggaaaagaagggaaaaattaatcttagctggataggaaggttagtattgagggagttatccaagaatcaaggttgtgacaaactgcctgaaagtaaaaatagatggagttgtaactgagatgaggtcttagcctccagtttatgttgagttccacatgtttgaatacatctgacatctttttgggaacaagctcatcacaagggcccaggtatacaaaattggccaaataccaatacctcaggcatttaaggctagattcaatagccctaaatagccataatagcactagcagaagcattaggtagtgtctggatattggaagaactgatttaactagtaagtgcaagataatgtgatacaaggcccattgccttgctaccaatagcaatgtagttagaataggctaaacagatgtaacaaacccccaaatatctagtggccaaaacaatatacaggctcatttgttgctcatataacctctccaagacagctgttcctacctccttgttggatcttctctttgtgacaattcagggacacatgctccttccattgcctggatatgcctttaactagggaaggaaaagacaatgtggaaaacaacttccacttttaaaatgctttggtccaaaagaggtgtgtgtcgcttctgctatcattgccattgatgatagctagtcacattgctaactagttatatagaaggctgaagacatgtagtctctagctgggtaaccactttgcagctacatttgtgtactattgaagactagggagaatgagtcttgatggggagcatgtcatctctgcttaatactcatgcaacagaaggtagcccaagagcgaaaggggcattctcttcttttctacacacagaacaggataacttctgtttaatgaggacctctgagaatagagtaccccatgagcatctcaggggtgccaagccattaatattggtgggactacctgcttggaggtggaccctgtaatattggtagatgcacctgtgaaagcacatatcatagcagcatgtatcagcaagagagaattggacataggaggagaaacagcttgtgtgcaaggttaaaagatttgttcatgagcacatgtgagagagaagccccaggaacaaggaaatgagaaaacaattactgcctcctacatgttcccagaggagggggctgggagagcaattaagcataaagagcattaattgcatagaagatgctgagggatcatagatttgaaagcaatttcaaaatatgagtattttaagacttttagcaagaacagacaccataggctgtatatagtttcctggagttatgattaaaggatgaaaacaacttttgtttagatatgtaggtaggtaagtaggtagatatagatagatatgagaatagtaagtttgtttaaacaaattattcattacatcatagtgacccttagtgctttttgatgatactgactgatatggtttggctgtgtccctacccaaatctcatctaatagctcccataattcccacgtgttgtgggagcaacctggtgggagatgattgaatcatgggggcaggtctttcctgtgctgttcttgtgataatgaatgagtctcatgagatctgatggttttaaaaatgggagtttacctgcacaagctttctctgcctgctgccatccatgtaagaggtgacttgctcctccttgccttctgccatgattgtgaggcctccccagccatatggaactgtaagtccaacaaacccccttcttttgtaaattgcccagtctcaggtatgtctttatcaccagcgtgaaaacagacgagtacactggcttattgaggaacagaatataatcagcctccttcattcctcactcactaaaccaatgtgctgatcatttctagaggcaaggacactccaagaatcaagaaagagccgatgatgaggctttctattattctcctggactggacgttgtctcagcttctgctgggccatagaaccctgcctctaccttgacttacccacatgttgttttggtgccaagtattgagtgctgcattttggggtgtacaagacagattggcatattgctaaaaatgtgcgaggacagaaatgacagaaactagtctgtaagattctcataggttccacttgtcttgcactcgtcatgtacaaaaatatgccaagcattgtagttcattaattcagtccttaccaaagctggtaaagcagttattaatttatccactgtaaagttgaggacatccagccttttggaaattaaataactcctccaatatcacacaagtaataaggaggttgtgcagaaattgaaaacttgtgaatttccaaagctcatgcccagctggaggttagagacatagggttcctaccaaaaatgtgttcctagcactcagcatagtgttcagcacttaagaggaaacctacagcagattgctaaactgggtatttacttacactatccaaaagtaggaaggaaacatacccatttgtttgtgaattattgtatcaaatcctattaatttcatcctaaatattaaataaaattcctaaataggaaatagcaatgttcatataaagaagcagcaaattaatttattggaatcgacacattcctcaaatggagatttggttgatattagagacttaatgtacctcccttagtgcttaatgtataacagagattccacttatcttacctatataacctaagaaatttgaatattttataaagttactttttagaaaacctgatttatttgttttccttgtcatctcagatggataccttcctctcaaaatctatttggaatttatattttcaagtattcaattaactaacatattaagcaggcattctcctgtgtaagttcctagcaacttttaccacttgtactaaaataaaacagatagttaagccaaatgagttaacttttctgaaagtgtatctttatacaacattaactatagacatggaaaatacatttattcacgttagaaataaatgcttctgtgagatctttcattttgataaagtcaaaacaccatcttattaataactactatattaattttgcagcaaattacaataagaccacactgtatagttgtgccattcagatgacatttatgaaatgctctaatttaacatggtgacatatattacctgcatcttttacacattatagcttatatcctctgagcgaaatagacctaaaccatccaaaaaaaaagagagagagagagagaataatgcaatgggaaattatacccctttgagaactagaaggactataattacattgcttcctcttaaaaccattcaaatatgtaaccattgctgggaacagcagtatgtggggaacctctttacactctttctgtcttgaacactcaaaagattgagaaaaaaatattcctttcctactatagttttatttgagcatgcttcagaattttacctttttgcacactccttagagattatcgtggggaagtttagaaagcagtttcttggaaatgccttttggaggggaagaggagctataaaaatataccagcctgacaaatgacaggcattgtagactggaaaagaaaagacatcttggttttacaccaatgtagaagcttttctttgcaaatgagtatttttgacagctgagcaagatgataaacagaagtatcacaaaacacttaaatggaaacaagtattatgatgtactttattcacctggcattctccaattcatgacatttatatgtggcagaacccactgcagattcatttatttatttttgaagtggaatgagttccttacgaaggtagcctgttacattaatgtggacttttcttctctagatgcagaagcttaaggaaaaaagttattgtatctgtactataaataagtggtaagtctcagaatccacatcttagggctgagaaggctcctagcaagtacaatatactgtataaatatagacaaataaatatagatatagattttttgtgtaagcaccggcagtgttgcaaatgattagatatttcataaatgccttttctaaaaaggtattgctgaaaccagtctatttctagaacttatattcagatgtttagaggtataaatgcttcaatattggctaagcttagaaaggctatgtttctctgaggctcagtgatagacataccaacaatttgatgagatgcatgactaagaagaaaaagagagtaagactgagtccctgtgaattgattgacttggtgcagtggcagagtaggtagcaagtattaaagcaatagttcttaaatgttagtgttcataagaatcatcaacagaactttttaaaaatgaagattcctaggttttaactttagcgacttttaattctttaggtctggtatatttggttgtgggaaatcaaaagactcaacttcggaatacactgaacagttgctgactatagatttgtatattcaaaattttttggtatttaaaaatggtatgtatggtttattgagtcaaatattttaaaaactatgaatgtgtgctggtttgtttttttttttttttctggattggaggacaatttggggtaagcattctctatttaacaagtcataattaactccctgccaaaactaagtagaaattgtgatttctataactcctatatttgataatatctcctaaaaatatttcagtgatatagcatttaattgcaaataattcatctagtcaccaaacaaatgtagggacgttcctatataccaggcactgtgcatatcaaggtgtatattacagtgaataacagaaacactcacgaagtgttcaattgaatttaaccttgaaatgtattatttattattattatgtttaaataaactatgtgaggtttttttttcattgccaatgagaaacccaccctaacttcagaatttttatctttaagtatatcctattttaaccacccttacccatccactctcaatgatttctcctcagtgtggggccttgccgtggaagtgtgccctggtcagtgagttttgagagtccgtggaagctagattgccctcggctcttcagttcccactgcagaactcttgcagtcactggctattggatcagcagaacctcttctattttcagtcgcccattttcaaattggctcactgaactttaggttctccagttttcaggtctttcaaaagtccgacacccctttactatcatctgctttctcctacacaggggctaatgccatgcaggttttgtgactgctggtggtgtgttcctacctgctttttttgggaggcttctgggcacagctggtcacctagtttcattataatcatttttaatggctttgctgttgttgtgttgctgtttagttctgtcagcttttatcctgggatttagagagacccaagagttctgtggccacataaccattgatcctgattcccctggagtctcttttgacttttactgcctaatttaagctgaacatatgaaatacatgaaaaaactgaaagctcaagctcgtttgttgtttgtcttcctaggttatggtttccatttctccctctttctcaacctattttgccaatcaatgtctatccttccttcactttttgcctactcactacaatattcaattacacaaacataatttttcctctgcccaccccagcaccagcatttttctgggagtttaagtctcttatgaatctgggaagaaaggaactaaaaatgagcagggatgaatagcaaaatgagtgagtcaacgagtagcaggcaggacattagagtgaagctgttttcttacccagaagactgatgatgggaaaggaaaaaagaacaattcaaaattagtagaagaaaagaaataattaataaaacatgagtggatattaatcaaatagaaattggacaaaaaatagtgaaaatgaacaaacgcaatagtttgtcctttgaaaaggttaataaagttgatgagcagaaaacacaaagtaccaacatcaaaaacacaaattaccaacatcagaaatttaaaaaagagacatcaatgtcgttgcacattttataaacattaaaaaattacagttttatgaacagctctgctaataaatctgatgtcctgaatgaaatgaacaaatgaacacaaaaccaacaacaaaaaatagaaatagcctcacatatattaaagacatttaattcatatctaaaaacctttcaacaaggaaaatctcagtcccaaatggcttcactaatgaatttgccactaacataaaggaataaataatattagtcctacacaaactctttcagaaaaccaaggaagggcatatatttctcagctcattttgtgagggctacctaactttaatcccataacctaacaaagcactaaaagaaaagcccattagaatattccatatgaacatagatgtaaaataccttaacagcatattagcaaatggaatcctgcaatatataatagggtaatgcatcatagctgattggatttctcccaggaatgcaaagttagtttaacatctgaaaatcagttaatgtagtaagccacataaatagaatacaaaagaattcccaggtaatcatctcaatagatcaaaaaactttgaaaaagaattcaaaacactttcatgataaataccctctgcctactaggaatacaagagaacttcctcaaactgaaaagggcatctgcaaaaaccctatagctaatattatgttaacaataaatgttaaattttttaccactacatcaggaacaaagcaaggaggtttgctcttataacttctactaaaaattgtaacagaagtctaaagtaggacaaaatgaaaaaacaaaaagccatgaatatcaagaaagaagtaagactattattatttgcagaaaatatgccactgtatagacagtgggagtataaaaattgcttggcaagcatcaagtcccccacatacaatcccctcctcacactactctccttcgtaaagccatgaaaaaccgctttatattctaagtaaggacgggatgtttgatgtgcaaatgcagctgtaagataaatccctgagcaacatttttggccaccctgcccttcctatagaaagtctggggctgtcactgaggtagggttagtaatggtatgtgagactggagagatatgtggaaaccacctcatggtatttggtcttcactagttaggcaatagggagctattgaatatttctgagcacaggagtgacacagaggtgtaccaagtaggtaagaggcagtggaaacaatctacctcagtggggaagagtattgtatcacaaaatttgtttagaattgctagtacttggtgataattaaaagcaaaacaattttaactgaatcttattattttaattttacttacagaaagtgcatcctcttttgtgtacccaggtgtttcattctcaccaccttaccgtaggattattatcatcagaattaaagtagatgaggcaaggcacagtggctcatgcctgtaatcctagcactttgggaggctgaggcgagaggactgcttaaggccaagagtttgagtttatggtaagctatgttcgtgccactgcactccagcctaggcagcagagtgagaccctgtctcttaaaaaaaaaaaaaaattggaatgaatgaaaattaattgatagcagtttattaaatggattagggagaggaacagactggtagatatcattcagtatacaatagctggttagtgatggcaattctgaaagaagaagtggtagaaactgggaggtgttgctagtgtagtatgacctttcaaaactcacagagtgcatagcttgtggatgtatagaacaatgtgaaagaataaattctccagaaaggaagaagaggagttagagattttataaaagagaagtctatgatgttctctaggaaagaaaagaattttctgaagaatatatgcattgattaaatgatttccttttgccctcatttatatttattttctgttcaaatgaaacacttaaactaacactcaatttccgggacagatttcctgttcttacattcttcaatttgctttttaaatttttactttgtttagcaatatcaacattgcctcattggcttttagtgagtttcttgagaagatgtaatctatagaacattagttcttctctcccaccagacagatgagtgcatagaaagacatatagttatactgctgctgttttaaaagtgttgcttcaaattacctaaaatatagtgactattagataatcactgataaaaactgtgttcatctaatttattcatcttgaaatcatgcttcatatttcctttaagcacaaaatagttatgttcacacatgcacaataaatcatatatggattacttgatgccttgaattcaccctcatagaattttatctcctaatgtaaagaaaactgactggggtaattattgcaggatcttactcttttctgttgtcagtaaccttcccaccaaactcattgtgacaattgtcacccggttgactgtgcatatccaccattgctccagagcctaggccagcagacttttgctgcatggtccaaaatggtgaggtcctgggtgtgatcacaaggcaatatgcagcaaacattagtgaccatcagtgctaacaaagaaacttacaaagtaacaacttgaccacttggccaattcttccactgtgttttcagctcttcacaggtgtaggccatgccttaaacttaattgagtctagcactcttcctgttactattattatatttgtagcttatgataagcagagtgaatttaacataggggttatgatcatgcatttgagagttgggccacttagtaactgtattagtccgttttcacactgctgataaagacatacctgagactgggtaatttatacaggaaaaatttatacaggacttacagttccacatggctggggaggcctcacgatcatggcagaaggcaaagaggagtaagtcacatcttgtatgggtggcagcaagcaaagagagagcttgtgcaggggaactcttgtttttaaaaccatcagatctcgtgagatttattcactatcatgagaacagcacaagaaagacctgctcccatgattcaattatttcccactgggtctccccccacaacacataggaattcaagatgagatttgggtgaggacacagccaaaccctattggtaactgcaccacctttaataagtaatttgatctttctaaggtttaaattcttcttctgtcaaatgaagattcatgtattttcacaaataataaaatgacgaaaattcctgccactatggagcttacattgtaaagtgatttggggagttggaagagaaagaacaatcaataaatataaaaataagtaagtttatttactaagttaaatgctataggagaaaactagacaaagtaaaatgccttgagagtaccatattaaggaaaggaattgcagttttggaaatgtagccaagagacttttaattgaaaagatggcatttcacttgagacctgaaggagatgaaggagttagtcatgtggaaatctggaagaagagacctaggcagaggcagcagcctatgcaaacaccataaggtggaagcacccctgatgtattcagaaaaggggctgtatagctgaagtgagcagaagaaagagtaggaatgtcccaagcctacgggatccttgtgcaagctgcaaataattggtcctttcactttgcaagtactgccccacatccatcaaatactttagaaggtttgaaaaaagtttgactatcaatcacttgatgaattttcctgcccactatttgctctataccagtgtgaaatgtacagagtaatacttccacttcatctttaccgagcacttactatgttccagagatgatgctaaacatgtttacattaataatctcagttaatcctgacaacagacctatgaggtagatattattatgctcattttattgataaatacgtgaagacttcagtagatttaagttgttcagagtatagttaattctgtggctagtaattgtggcacataatcctaatgttccaggaatttatatcatttagttgaggagacactcctcaactcctgtctcaggtgacaggagtaagtgaaattctaaggcacaatatagcatggtgcataagcaggcaggactgcagccacagaaccctcaattttaattcaggctaagtcacttactttcccttttatgttagagacgtctgttagtttttctacaggaagtataatacctcacagggtaatttattcacaaatacgaaaacatgtataaaacatcatagcagtctgcctgcaatatcgtaagtgttcaaaagggttgtggatattattattgttgttgtaagctaaggaacgctagaaaaacatcaaagattcaattactcaaaataacttttgctgagcatctactacatgtaaaatatgtatactgtgggatcaatggatgatgtaaaggtgcaaaaggttctggcccttggggagtgtatggtacactgggaagttatattttcagacaagacataataattctaatacaagctagaccttaaggaattgaatgacagaggtaacaagaaaatgctgtaaaatggctgaggagagaaaaatcctctaatttgggaggagctcagtattgacaaaggctagaaatgggtagagaacactttcccaaaagagatgtcgtggtgcctggtgagacaggctgtgaacttgacttctcccatccgttccattattaatgtgtgtctctgtgctctagcattcatttcatcttgtggacatgctattgtttccatttaaaaactctcttgatcacaatttcttctgtggcgatggtctcatgtcctgctctcctttttggcaaaactccttaaaagacttgtctaggctcatgcctccaaatcctattctgctattatttcctggaaatatatctgtcaggccttcactctcatcattactttgcaacttttcttgttaaggtctccaaggacctctgtctttttaaacaaagctaaattctgtcttcattgtatttgacatacaagcaggatttgacacagttgatcactctcttttcatttagaggactccacattctccgggttttcctcccatatccctgactatttcttctgtatcctttttctgtgccctcctcttacctttgaacacttattgttggagtgctctggaactctctttagaggactttcctgtatctacgctcacgcccttggtgatattttacttcaaataccaattatacacagacaatactcaaatgaatttcacaatcatatttccaattaaacacttaacatgttttatatatatatataaaatattatttgaatttaattatctttatcttcacatcaatacataataatctatcagcaaatcatgttggttctattttcaaaaatatccatagtctttcattcttcctagattcaataattcctttgcttgtctatttagttttctatatgtcattaatcttcctcatgctgacgtctttgctacatgaatatatacatatatatggtacacatacatatatattttatgcacacacacatacatatttatgctcaaggacctcctgccctgctatcagcctagagcttttcatatacctctacatcctcatttcctgaatcccatgccttccattcttgttgctgttgtctgtttactttctttttgctggaactatattactcaatagcttcctgatataggaagttaaagttttgaatccttgcaaatccagaaaatgtttgtattctttctttacaggcaaccgataatataacttagcatagaattctggattagaaataactttactcataatttggaaggtaccattcttagctttttagtttactataatgttgcagaatactgcagtgatattctgtattttctatgtgacttattttattggtctctggaaatttttgtttcctttttatttttggaatttgaatgcttcatgagattgcaccttgatctgggtttttccaccagcatgtggtgagccttttttttaactttttaatattttatttttaatcaatcaacacataatatttatacctattatgggatacagagagatatttcaatacatatgtaaaatgtgtgagtatcaaatcagtgtaattagcaaatccattaccaccaacctgtatcatttctttgtgttgggaacattcaaaatcctttcttctagctatttgaaaacatataataaattgttgttaactatagtcaccatacagtactataaaacacaggaatttattcttcttacctatctgtgattttgtatctgttaaccagcctctccctatccccttctccctgctatccttccaagactccagtaaccactattcgaccttctactttcatgagatcaactggtttagcttccacatatgagtcagaacaggtaatatttatctttctgtgccaggcttatttcacttaacataatgtcttccgggctaaacataatgccctctaggctaatccatgttgcttcaaaagacagagttttattccttttcatggctgaatagtatttcattatatatttatatatgtgatatatgatatatatatatatatcaaattttctttatctattcctttgctaatgagcacttaggttgattctatatcttagctattgtaaatagtactgcaataaacatgggagtgcagatatctcttcaacgtactgatttcaaaacgtctggatatatgtacccagtagtgggattgctgaatcatatggtagttctctttttagtttttttaagtgaccttcatacttttttccataatggtatgctaatttacattcctaccaacagtgtataagaattcccttttctctgcatccttgtaagcatttgttattttttgtcatttttataacatattttaactgggaaaagataatattgtggcttttgtttgcatttgtctgatgattagcaatgttgagcattttttcgtgtacttgttggctatttgtatgtcttcttttgagaaatgtctgtccagaccatttgcacctgttttaattggattatttggggccattgagttgattttcttatatattctaggtattaaacatttcttggatgaataccttgcaagtatttttccattctgtaggtcgtctctccactttgttggtagtttcttttgctgcgaaagggcattttagtttgatgtaattccatttgcccagaccaatgtcctgaagcacgtctcctaggtttacttctagtattttcatagttttgggtcttacgttgaagagtttagtccattttgagtggatttttgtatatggtgagagacgggggtctattttcattcatttgcacatggatagccagtttccccagcaccatttattgaagaggatgtccttttcccactctttgtttttggtgactttgttgaaaacccgttggcagtaaataggtggatttatttctgggttctctattctgttccattggtttctgtgtctgttttacgacagtatcatgctgtatagctttgtagtaaattttgcagttaagtagtatgatatcctcagtcttgctctttttgaacaggtgactttgtctcaagattgatttgtctagctcagtggggtggctcacgcctgtaatcccagcactttgggaggctgagttggacagatcacttgaagtcaggagttcgagaccagcctgaccaacatggcgaaagactgtctctactaaaaattcaaaaattagcagagcatggtggcgggcacctgtaatctcagctactcaggaggctgaggcaggagaactacttgaacccaggaggtggaggttgcagtgagccaagactgtgccattgcactccagcctgggtgacagagagagaccccacctcaaaaaaaaaaaaattgctttgtctattctgggtctttatggttccatgggaatttaaagaattttttcttctatttctgtgaagaatatcattagtattttgataggaatcatattgaatctgtagattgcttttgataatacagtcatttttataatattagttcctctaatccatgatcatgggatgcctttccattttcttatgtgtcctctttaatttctattataagttttatagttttccttgtacagaacttttaccctttggttacatttattcctcagtatttttgtttttttagctatcgtaagtgagatttcatttttacctagtttgtgcttgttgtataggaatgctactaatttttatatattgatttgatatcctgcaactttattcgtttagtttatcacttctaagagttttttggtggagtgcttagtttttattacatataagatcctgtcatctgtaaaccagaactagttgacttcctcctctccaatttgtattcctgttatttctgtctcttgcctaattgctctggctaggaatttctagttctaggttgaataaagagtagtgaaagtgggcatcaccatcatgttccagttcctagaagaaaagttttcaccttttctccgtttaataagatgttggttgtaggtttgtcatatatggcctttattattgaggtacatttcttccatactaatttgctgacagtttttagcataaagggatgttgaatttcatcaaatgctgtttctgtcttttgagatggtcatatggtttgtccttcattctgttgatatacttttatttatcccatttattcaatttgctcatattgaatcattcctacatccttggtataaatcacacttgatcctggtatgtaatatttttgatgtgctgttggattcggtctgccagtattttattgatgatctttgcaactatggtcatcaggaatattggcctgtagtttttgctgttgcatatttggttttgctatcagggtaatgctggccttataaaattagtttagaagaatttcctctccttcaattttttggaatagtttaagaaaaaatggtattagttcttctattaaagtttggtagatttcagcagtgaagccattgatcctggacttttctttgttgggagactcttaattactgaatcaatctcattacttgtgagtgttctgttcagtgttctattcctccttggttcaattttggccagttgtatgtatccacaaatttatccatttcttctaggtttttcaatttgttggcatatagttattcataatagtctccaatgatcaactgtatttttgtggtttcagttgtagtgtctcctttttcatttctgattttatttgagtcttttttctttttttctcagtctagctaatggtttgtcaatattatctttcaaaatatcaactttttgttttgttgagcttttgtattgtttttggtctcaattttatatccttcttctctgatcttttttatttctatattgtgccttgcagaggacctttctagttaaatacatttgggaacttttgagcttcctggatctgggtatctatgtctgtcccaagacttaggaagttttaagttagtatttcattaataagtttttattaccctttttgtcatcttgtctttctaagctcccacagtatgaatagctgtttgcttaatggtgtcccacaagtcctgtaggctttctttattctttcttattctgttttctttttctttctgtctgcttgagttatttcaatagacctgtctttgagttcataaatcatttttttctgcttgatctagcctgttgtcaaaactcttgattgtatttttatttcattaactaaattgctcagctccaatatttctgtttggttcatttttatgataccaatttcttgttgaatttctgatttagatcatgaattcttttcctgatttttttcagttgcatatctgtattttcttctatcttgctgagtttccttaacatcattattttgaactccttttctggcattttgaaaatctcttttactttggggtctgttactagaggattattgtgttcctttggtagtgtcatgttttcttgctttttcatgtttcttgtgttcctacattgatacctgcacatctggtaaagtaattgcttcttttaatgttatggactagcgcttatagggaaagatttactcctgtagataagttctagagtgttaagtagagggtgataacttgggtcctgagtgggcacagtagtgtagtctctgtgaagtttcttcaactgtaatccatgtcagtaatgtttgtgaatgcttcactgacctaacctgtgggagtttgtggcagcagtgacatgactttactggaatcaggcttattgagtgagttatcaggatggaggcatgtttgtgcatgtgatgggtcacctagcttaggaactggcttgctttgggtgaagccgtgggctgtttctcaggccgggggcatgagtgttcagtggatcagctggttctggaactggttcaccaggagtgaggctgttgggtcgtttctcagtttaggggcataggcacatgttggtttgccagccattaagccttttaaaactatggtttcatgtctggaaaatgtgtattttatactaattctttattaacttattcctttaattttttttccttttggtgtatttctgaaaatttgttttcatctcattattattgttagcctttctgatgtattttcttatctttctcttctaatcttttagttgagatttttttccagcctttttttttttttttggatatagaatcttagtatattgtctaggctggactcaaactcctgggctctaacaatacttctacctaagcctcctgagtagctgggactacaagcacatgccactatgcctggctgtatatttttaatatttaagaattctttctttcaccaattgtttattcttttaggcttttttttgtttctatattttttaatgaatgcaacttttatcttctggggataacagagatattttattaaattgttattagttgatgatttcttccatctctaattccctgcattgtttgtttcctcatctggattatcatttttcatcctcctcctttatttttgtttctgtcattcacattgtatattttgcacatttgatgaattttgccatctgctttattctgtagagaaatggtaaaacatttccaaaatggcctttactcatgtttatgagcagcaatacagctttactttgcagaggttaaaagctcaaatattagttctagagttcttatctttgtagtatttttctgccagtttcctctttatggaaaataactctggctcccggctttctttaaactgtgtagaaggggagttgtggtggtaaaggggagaggcagtgtatacagactttcacttaatcctttcatgtctaccttgtgcctcttccaataacaagttgttgatgttccaatataatggagctggttaatttcaattattcttgacaataagactgatgtcactgtggagtaggattagtttggctggctgagtggggttgaaaaggggacctgaaaatctaaatactttctatgtggaatacctctaattcatgattctcaaccttggcactatggctattctgggctgggtaatttgttgtgagggatggatatgtgcattgcaggatgtttagcagaatccctggctacatatcagtatactacatgccagtagaactcctcccctcactgggacaaccagaaagttcctctggggacaaaatcttccttagctgagaaccattgtttaactttagacctgtgtgtgtcctcttacttctctcaatgtttcattatcttcaagtcttaaggctctcaaagattctataggaaaaatcagttttcatgttttaggaatccaattcagctagcactcaagctgtaacttctctgattattcaagaatgttgtcaatatttatttctatttcttaatttcattttctgtcttcaaaatttttgtaaaatgtatttcttccctattgatttctctgctggcctcattaaaattatgggttatattttttaaaattcctatttttttaattgaagtatcaagaaaaagaggaaaaggcacatgcttgatctgaactttatcaaaaattggtaattgttttcatctcttactattaactcttttttaaatcgatcctcttgctttaggaatccaaatcagcctgcactcgtactgcagtttctctgattagtcaagaacgttgccaatatttatttatatttcttcatttcatttttcgtctttgaaatttttgaaaaatatatttctccattattgttttctctgctggtctcattaaaattatgggttttacttgttaaaattgctgttattttaaagtagtgagaaaaagaggaaaatacatgtgcttaatctaaattttaccaaaaattttatattttagtaaatgtattcagatgcatatttttctgacaatgggcagtcttagttaacacctgtatcctttttcttgagcaagaaaataaatttattataatttttacttattctgccctagtattcctcatggataaatcgtgtcttaattttattaatctttgaatgcatcaattctaataagttggatcctttgtcagaaagcagaatgtgtacaatatacttatcccttagttttgtcttcctgggaactggctcttgatcacaataggatatatacctacagatcagcttcattataatttaatttactgtatttggcagcaacatcttctagtggtaacctagaccgagatgaaatattccatttcaattgacagttataaagctacagaccatagatttcagttatttgagtagttactacattaaaacacatctttttttcccttcctttgctcccaaccacatgtgcagcaaccagtatgtttctaaattttgctcctgtttataatgctatttcttaagcttctaaacatcgcagtgtgcatttcacctctgctaatctccatccaaattctgctatgttttggagtttgtaagaaagtgtagtgctgatgaggggattgaagtttcaggattccaattttggctgcttaacaggaacagttgaaggatggcatgaggtttttgatccatggttttccatttccctggtatagtaagcataggtatcactgccaaacttctttggagctctatgttatttgggttgagagcttggagctatgttaaacagctgaataaatgtttcccaatgcagctctgtctatgatgcagctcctgaaaattctctctgaatgttgtcaactagttttctcttaaattgagtttatagttgttttgtcaggtccaaatgtctttttgagactttactttgactgaacattgtgatagaatttatcctcctgcttgaaatgataaaaatatggacaaaatgtattaaataattgtttgctagatgttggacatcaggcaatgaggacaatgtttgctgagaaataggaaataaattatgtgaatcttacaattgacccggattactgcttacagagtatttctagaccacgacttagggagagaaatcccagatggagctcagagagttctccaaattgaagagatatagccaagtgtttcaggaattcaaagtagttagagtttgcagagagcagatagaggaacacagagataatttcacagatctacagagcatcttccttaagaattcactttactacggttcactgcatgtatgaggctgcagaaagcacaactttcaattattaaaagtaacaataattaacactcatgtaatgctgggtatgtgcctatttccactagctgaactggcgagaaaatttatgattcgtgggatatttgataagagtacacaaaagggtctagcctcaacagtggagaatagccctaggctgataactacttcaataccacctaataaatcttaagagcaagactcaaaaggaactgtttccaagtaatttaactgcatccaagaacaaaacacaaatatatttgtaagaacactgaaatatgtagtacctaacaagaaaaaattcacagtctctggcaccaaatcaaagattatcaggcatgtaaagaagcaggaaagtacaacttataatgaggatgtaaatgcatcaatcaaaattgatccagaattgtgagaaatgttagaattatcaggccagtatgttgaaacagatattacaactctacatagtttaaaagctacataaaaatatggaaggtactaaataaccccacagatcaaaattccagagaaaaacctacactgtatggaatgaaaatacactggatataattgattatacattaaacataaaacatttatgttatatataaaaaattagtgaacttgaagtcatagcaatataacctatccaaaatgaaacagagttgaaagagcatttgtaaaaatgaaaacagcatttgtgagctgtgggacaacttttagaggcttggtatatgtgtaattggagtccctaaaggaatggtggggtggaggtgggaatataaaaaatattcaaataatttatggctgaaaaattccaagtacagtacactgaaaaccataaagccacaaacccatgaatctcaagaaaactaaaaaataagtaacatgaaggaaatcacaaaaggcatattataattgaattgctcaaagctagtgataaatttttaatgataaaataaaatactacagcagccagaggaaaaagacgtgttaaatacaaaggcaaaacagtaagaatgacaacagatttcctatccaaaataatgcaaagaagaagacagtggggcaacattcttataactatgaaagaaaataaatagtgcacttatgattctatatctagtaaagatatctaagatgaaggtgaaataaaaactatttgcaatacatataatgaaagagttcatcacacagaaacctatactataagacacattaaaaagaagtccttcagtaggaaataaaatggtatcatatggaaatatggatctgcacaaagaaacaaagagcacccaaaatggcaactgcattggtaaatacggagggtatttttctaatgatttaattttctttaaatatagttgacagtttaaaaaataataataatatagtaaaagttttataacatgtgtaagtaaaatgtttggcagtaataacacaataattaagagggggaaaaggaagtacccttgacccttgaacgacatgggagttaggggcactgattccctgcacagtcaaaaattcaagtttaattttgactctccaaaagcttaactactaatggcctaccattgaccaaaaaccttactgataacatgaacagtcaattaacatttattttgtatatattatttactgtattcttaccataaagtaatctagagaaaagagaatctttaggacaatcataagaaagagaaaatgtatttactatttgttaagtgaaagtggatcataaagatctttgtcctctttatcttcactttgagtaagatgaggaggaggaataagaggaagaggagagattggtcttgtggcctcatggctggcagaggtggaagaagattcttttataagtagactcatgcagtgataacccatgttgttcaagggacaattgtataccgttgtaagatccttatactctatttgaagtagtctgtcacttaaagctaggctgtgataaagatgtaggataaaaaccactaaaatcataaaacaaagagttataactaataaaccaacatggagataatttgaatcataaagaaatataaaataacacaaaacaggcaaaaaaaaaaaaaaggaaaaaagaaatcccaagcagatgggacaaataggaaatatcaagataatagatttaaacataatcatatcaataataatgctaaatttacatattctaaatactccacttaaaatatacagattggaagattggttaaaaaaggaaaaagtacaacttaactatatgctgcttacagaaaagatatttaagtataagacacaactaggttaaaagtaaatgttggaaaagataaatcttgtgaacactaatcataagaaatctagggtgactttattaatatgagaaaacatgaatttttagaaattttgtccaagataaaatattgcccaggatgaagaaagtaatttcattttgcaaaaggagtcattttgtcaataggacataacaattcttaatatttctgtaccaacagcagagcttcaaaatgcacagagcaaaaactaacgtaactgaaggagaaagtaaaatccacatttgtcggcaaaaatttcaatacccttctctcaataattaatagaacaaactgacaggaaataagtaaatctatagattagaacaacactgtcaaccaacttgacccaatggccagttatggaacattcaacccaacagagcagcaaactacacctacttttcaggcctacacaaaacatctaccaaaataaatcaaattctgaaccataacacaagcctcaatagatttaaaagaattcaaatcatataaagtacattatggggctgcagttaaattaaattagaaatcaataacaaaataacctggaattactctaaatatttggaaactaactaacaaaattctaaataatccaagattagaagaggaaacccaaagaggaattaagaagtattttgaactgaatgaaaatgaaaacacagcataacaaaattgtgagatacccaatatggcaggacttagtagtatattaatagcactaaatgcctatgctaggaaaggatgaagatttcaaagaaatatcttctactttacaaaactagcaaaagaagggaagacccaagccaggctaatgaaagctatttctgagtttctaactgcatctcatggggatgatcatttcttttctctgctcttgtggctgaaagcatgttaaggccaaaattgtgattcaggcaagacccaaatttataagaccaagattgcattttaagccataaagagcaggagaatctccatggcttgaactgtgaatagatatttgtttgttatcagagatagtaattgtactgctttatctgtatttccttccatgttagtaaaagaaagctcagaagtagttgatcacatgatcatagagaataaactacatttctcagtctccttggcagctaggtgtagaaatgtggtttaagttctggtcaatgatattttatctattaacgtttgctgtttaagttagtggctaaaaacaataaaaattgcgtatttatttaggattctatggtttggctcagtgctggtgtgcactggcttgtccaacctcttctgggctctctcatttgtctgtgattagctagctggtcaagcagcagttagataggaagacctcactctcatatgtggtggttggcaagctggctgttcactgggacagtaggagcaattattagctggggcacctcagttctctgccatccaacctctaatattccagcaggatagcatgagcttgctcacaaggtgatctcagagttccaagcccagcaagaaagaatgaactctaaatttgcaggcattttaaattgtctgtttgaatcatatttgcaagcattatatgtgctagtatttggccgaagaaaaccaataggtcaatctagagttattgtggaaggatcgtaccaaagagtgtcttagtgtatttttaaaggaaaggggaatgcctttctctctttctacttcttggtggacagcaattggttttagagtatgagtagatttgtattttctcacattaaaaaggtagaatctacaactgtggaatctatagaagtaaactgggtattttcagttgaatcttgggaaactgactaaagttaacatttttaaaaataataatgctttattttatttttaaactacattttaagatatagttaatatacagaaattataatctatatgtgttacagagagattaatgaaatgggagtaaacttgttattttattaatttgtggcagagttcatatagaaagaattgtttttattgacaaaaatatctcgataagacttaggttttggcaagaatcaaggcaatattatacacttttgagatgtctgtgaaaaagtgaccatgtaaagtcaggtgtatagaaaaaagtgaatatgctttatagcagagcaaggaggaagaagagagaagccacagaagatggtagataattggagtgcaagatggtaggtaattggagtgccaatgaaaatctctagctatagggaaactaaagggatattatgaattgcaaagtaatgatttaattcctcttttaccccgaatctttaataaggtttaacgactacaatttgtttgtttgttttgaacaagacttcttgaaattgaggcattagctgagtttcacctctgggtgacatagggcagtgctggcagaagccagaaagacttcaaaatggaagaagcagaagtgtagggtcagggcgactacgaaatgatcaatacgcatagaattcttataaacttaaggaggacttctgtcattcagggatggaattagggtcataggctgccttatctagatttcaaaaggcaaggacgctccagatgatacatgcattacatgtaaataagaatacaacaaggccaggtgcagtggctcaggtctgtaatcccagcaatttgggaggccgaggcggacagatcacctgaggtcaggagttcaggaccagcctgaccaacatggtgaaactgtgtctctactaaaaagataaaaaattagccgtgcctggtggcccagctactggggaggctgaaacaagagagtcacttgaacctgggaggcggaggttgcagtgagccgagatcgcaccattgtactccaaatttgcaggcatttttaaatgtctgtttcaatcatttttcaagagttaaactccatctcaaaaaaaaaaaaaagaaaaaataacaaaacatataaaagataaaggttttgcacttttatttctctttaccttttgcacacttccttgctctttgaaaaagtattgtttacatgtaatgtttaagattattctttgacggaaacatcacatatgtccaatgccttaaggtgtttactatctctttggagaacaggactgatcctgtaaagtaccagcaaagactcaggcctgagttatgggttgatgtacttgaagtgttacaagtatgtacccacacgcctattggattttcatggtatgcctatatgttacacatatccaccaataaatgccatctatttttgtaggctgaatcaaatctctgtcttgagtaatgattttgtatcctttggactagatctgaataagactgagaaacagccaggcacaagaaggcaattcattgttctcactcatctttctaaacctatatgcatctttgatattgaggttcattattagctacaactacatttggtttgcatataaccatttatttttcagtcttagatattttcatatcaattgtcttaattatccttaaataaagcttccagtgagtctctatttcttggatgaggacaattgaggcagtgatagttctttaaaaattatttaatttctaagtccttcactatatcttgtaactgaatcccaacctagatatttttaaatatccttgaaattaaatataaatcaaataatatctttccacatgtaggttacttccctctatggtaactctgcctccaaatgtgaagagctggattcaatccaagtgaaagaaaatcagtggggaaaatgtcagggactataaaagagatttgaagtctgtacccacattgctgtgttagagtcctgagttattaaatttctcatatttatttgacattttatatacatatgtccacttatgaagagtttagttcttatctttctttaatcaacacagtattaactatgcatgtagtagatgaacactgtattttatgtatttgcattcttttcaaaccagatgcttaaagaataaaatgacacagtgttttagctgttattttgctttaaaatgctttaaaacaagaaacatttttggaatttcttatcacaatataaatcagctaagtatatttaatgtggtgaaatgaatcataaataggctgaaatagtcctaaaaggggagttgggtaagaaaaaaatgtattaggatcaatatcaataggcataaataattctattaacaaataacattaaacattgttacactgtttatgggatgatatcattatatcattatagaaagattctcccttaatttaaatacctagcatgtacaaaacaagtttaaatcaatgagacagtaaacaagaggaataaaatagagaggtgggctgggtgcagtgattcacgcctgtaatcccagcactttgggaggccgaggcgggcggatcacgaggtcaagagatcaagaccaatatggtgaaacctcgcctctgctaaaattacaaaaattagctgagcgtggtggcgggcgcctgtagtcccagctactcggaaggctgaggcaggagaatggtgtgaacccagaaggcggagcttgcagtgagccgagattgagccactgcactccagcctgggtgacagagcgagactccatctcaaaaaaaaaaaaaaaaaaaaaaaaaaggggaagtggtgtcctaaagactaaattaactgctgactattttctattttcagtctctacatatttatatttttatttctttatatagcattgaatggttaattccccatttcccttttattcttatacgactaacttctatgggttttattttcattcagttctgtatattccccctgctgaagcctcccatgttgtgtgtcaagaggaaaaatatcttattaccttcttgtctgttgaacatttagttttcttctccctccctccctgtcttgtacctaatgagcaaattatctaaaaatagatacgttcatcattctacaaaatgttgtatcttctctagattggaggacagtgtaattgtaagagacacgtgtctggcaggcagtgcaatcagtgccagaatggattctacaatctacaagagttggatcctgatggctgcagtccctgtaactgcaatacctctgggacagtggatggagatattacctgtcaccaaaattcaggccagtgcaagtgcaaagcaaacgttattggtacgtgtaacgcaaaagtttacagtcacatctctattaccatctggaataaaattctctatttgatttcttaactgaagagtaaagcaaatttctttgctcaagacaggctggaaaaaaaaacaatttggatgaaattaactgtttaaaatgattaaattaataattctatcaaactgcagcttgaagcttagtttaatcaaccctttagaagtttctttattctgtagatgcattaattcccatggtcccatactaataagtcatagaaaaatataatttgcttactgcatagatgtttcttttagaaaattagcactttttcaaaatgttttacacttaatgagttctaagcaaatcatttccatgctagttttcttaatagaccaaaataagtggattttttcaaaatattctgtgctacagggtcctttgtgataaatctttccatttttttctgttatatttctttgaactgttcctatgaaatgcaaaataagtcaacataattctacagatcatgtatattgctagggttacttacaaagggctacataattttaattttgtaattcagcaccaagttgattataataaacagctgccttcggtgttatttatcatttttttatacaagacgtgcttttttgtttgttactcccacaggtatttttcggaaattagatttgattatagcaatttattacatccaacatttttgaggggaaccaccgccacataaggacaaaatttatcaagtgcctaaaatgcactatgttcataatgcactttgaaattttgatatatgagaatattatgagaggaaagtttcctgatgaagtgagccctgtattgtaactgaatatgtcttggttcctataggaagtttaaaaaagacctttgcctttctattgtcattcaagacaccaagtcatccatggtttttctaacactgacctgaaccttacaatagtaaaaatatgcctggcagtgattacacacactcctctctctctctctctctcacacacacacacgaatgcttacatgtacacatgcatatgtacatatcattctgaatactattttcatttctgtgatatacctctaaatctaattctttatcttttatttatgtaagtgtacatcatgctacacaattcagctagacaagcgtttcaatttaataaagagaatgtaggtgtgtttagtggcattacacgagatttctctggtttaaagaaacattacatgaaaatctgtaccataatttacctatatgcatctcaagcatacagaaactaattttttagaaagaaagaataacgtgtaaagagaagtacatatttgtatgtgctatccatgatgctgaaggaattctaagaccctgaattcaatttgtatggcatcctttgttctttaatgtgagatatattttaaactcaagatgtgaaaacaaaagttaaagcaagacctttaaagacagtgaaataattacttctttgtatcaatggaatctttcttgtgatggttagattccagagcttgaggaagggaaaaatcaaaattaatttagaatgtataatgccatccctactatttgcctgttttgttgattgatccagatggttttctgcaggaaacataaatatatattttgtgaagactaaattacttcagtattataaataattattatttctagtgttatttctgcaaatgtagtactttttataaaaacaaaaacttgatatgcatatatatttactttcctaatgggatcagcaagtaactttattcaatttcaccttgttaatatgaaaaaaaaagaagcccagaaaatacaagtgtatgttgtatacgcttcagaaagcaaactgttagagttaacaaaactgttaaatcttactaatgattctatcaccagtaaaatacattagcaccaataattttattaaagtaggtcattcatctagaataaaaagggagaagaatgtgaattaaatgccaagtgtgctaactcgcctgtacttgttaacaccgaatgtgatgccctgtaggccttcctgactatcgttaggaatagattacctgtcaggaatatgtatggcatattcaaataagcactgtgcatatttttaaaactgatatgatatgaatccatgtagaccaattttaatagttcaaaatgagtcataattcttgttaacaatacagttatttttaaaatttgcagcaatagtggtccttttttattttccttattgaaattaaatgatatgccttaggtgagtcattcatcactgttaaagaacttgccttcattggagttcttgaatttttatccatatatatacatatatattatgtatttccttccagtttaggaaatgcttttctacatatgagttcctgagtatgtttttgactcttattttaagattaatttttaaattgcaattatagcttgaaataaatgtttcagttgattcaacccatgcagtgagttatttaaattcatggatatttggaaactatctaaaggaagtattttgcatctaaacatttactattctaatttttttatttctttgccttgtaatacccttttatcttttagaataaccttacttgtcagagatttaagtttaggtgataaaacatttttcttcattcgtaaaatgtatatgtgtactcctttaaatagaagtaatataaaaaacagaatttacttagtgtttaaagaggtatgttctgagtcacacaagatgacaagcaatgtgattgctttatgagccaaggagagcatgatttatattaattgaaaatgataaaatagaggagcatacaaaaggattaaaccaaaaattgccctggataagttttatttatattaattacttaaatgtgtggattcagaaataagtgtatatgctgttttcacaaaaatagttatcagctgacatttttttcttttttcccagcttcacgaaggtataattaaataaaaattgtatatatttatggcagacaacatgatgttttgatatatgtacacattataaaatgattaattccagctaattaatgtatccatcacctcatgtacttatcatgtttttggggtgagaacatttaagatctaatctcttagcaattttcaagtatacaatacattattattaagtatagtcaccatgctgtacaatagagctccagaacttattcattctgtctagctgaaactttgtactcagcttaaccttttattaaacatctttagagatttcttatctttagaaaaacaactaatttgttatatgtaattctactataattttaaatgagcacatttgttaaaatagtttttaagatttgttaaagagaaaaagagctccagcatatgtaacagaaacaacatttgcattaagcatttttctttgcattaagtaataattaaaaatttatgaagttcatcgcaaacagttgtatattaaagctaaattaaatattgtcattgaattttgagagtaagattggccccctatggcattgcttgtgagaaaacactcaatattttgtgttcgtatcatctgcagtagcattgtttgtgtctcgtctatcttgaatgaaatcattttcccatcctcaccttttaaatatattttatctttagggcttaggtgtgatcattgcaattttggatttaaatttctccgaagctttaatgatgttggatgtgagccctgccagtgtaacctccatggctcagtgaacaaattctgcaatcctcactctgggcagtgtgagtgcaaaaaagaagccaaaggacttcagtgtgacacctgcagagaaaacttttatgggttagatgtcaccaattgtaaggcctgtgactgtgacacagctggatccctccctgggactgtctgtaatgctaagacagggcagtgcatctgcaagcccaatgttgaagggagacagtgcaataaatgtttggagggaaacttctacctacggcaaaataattctttcctctgtctgccttgcaactgtgataagactgggacaataaatggctctctgctgtgtaacaaatcaacaggacaatgtccttgcaaattaggggtaacaggtcttcgctgtaatcagtgtgagcctcacaggtacaatttgaccattgacaattttcaacactgccagatgtgtgagtgtgattccttggggacattacctgggaccatttgtgacccaatcagtggccagtgcctgtgtgtgcctaatcgtcaaggaagaaggtgtaatcagtgtcaaccaggtaagaaagaaatgtattacattttcagtgcacaatgacattccttttgttaacttaggtaacttctccctgtttctggtttgtggcttctacaaattttatttccaaaatcattactgtatttatatcattatccaacacatatataactatttaacttattcaaaattatctgcatatttatgttactattttgagaggatactttagataaaactcagccgatcggatttatttcataattgagactcaatttctacacttgaagtaaatctcctttttaacagttttttaaaaatcagatcaacaagagtcaattttattttccagagaaaggaaaatttgagttgaatatccatacaatgccaaatattcaaatgatgaactaaatctctgaataaagctggctaaatgtttttgctgaagaggctatatgttctagttttatatagaaatacctagaattgtttccacatgccatcaaattaataaaataggccactgtttaatctcattatatacaaacttatctttccatctctttcccaattgggagagggatagaccccatctatggctctccttacatttaagattttaactaaaatactataccttctttacaataaattcattatgatatgatgataaatataagtacttatccgttgtttaacagctgtgctaattgttgtcctgtcagccaatattagctctgagttatatgggtctataaaaatgagcatgataccaactcaaaagtgtgatttgcttgccagagaaggagtagaacaaaagttctgttaacatagcaaagaatccagcctaggataattgggccatgcttttcctttggcattggtcagtgtgtaagatcaaagagacaagaaggaattgatgaagagttcattctttttgtgatgtaagtattaaaaaacaacttgaactggtttaaacataaatggagactatattataactagatactccataaaaacctaaggagaaggaccactgcagtcaggactcaggaattagaatgcttccactgatacatattcatttgtctctctctctctctctctctctctctctctctctctctctctctctcagaaggggactttacctctctctttctctacatgggtatatggccaccctatgtcccctgaaattgtttataattctaccaccagccacaacagagcgatttattagctacctcttagttataatttctagaggaaaattcgaattgactcagttttgtttggttggttacctctgagccaattcattgtggccaggggtgtcacgtacttataaaatgagtatagcttttagggaccatttcatcaggtagaagcaaggtggtaagtatcccagaagacaggaagattatggagacctgggcagacagcctaaatgacagatacagcacattcactctttttaccttcaggttaatcctttcaaatttgcaatcaattaactttttgatatcctaagatgagatgtttttttctcttttagtgtttatcaatatctctaattttggcaacaaagtcctttgtctcctacacagtcaaataaccatgatttatacatccttctttctaagtaaaccaaaacaagctaatagatcaaatgttatatccttttgagtaattatcaattgttaaaatttactgttccagtctaactttaattgtatgtataatacaagtcacatgttttaaacaatttttctgattttggaaaaactctgaaatcatagttacaaacatttgttccctttggtccttccaatgaaagacccaatccatcatctcaatactttgtacacctaccagatatctaaatgatgaactaaaattgttagaaaacctttgtttttctggttgttttgcatatcattgcagaaaaagccatggataatttaatctacaccatgcataagactgtctcatttgttcccttcctaggatgaagaaatactgacttcattgctctttcctttatctttgtggctctcattgtggtgatctctttgttcccaactctaagcccttttctcccacccaaatctatggctctttcctgtctaccctatatagtattggcagaataattcccctaaagcacttaattcgttatgtcattctcctgtagggttaccaaaaatgggttttattttgcttatcatttgagtccaatctgggcaaacctttatgagtttttatcttccagtcgcagtctagacacctagctttgcttcctgatattccctttctcccatcttcttcagtcactgcagccacttcactggagctacacatgtcacatgcagagccgatttcaatctacctgatgctttggttcattctcctttcccgacatggaatgcagtataatcctccttttcaatgttagttggcatcctctgactagttttactactcaacatactgcctaaaattctccatcactcagtgaacaacaaagttgacatgagcatcagtgttttaagaggtggtttaactcaaacctatagaaaacttgaaaataaggtgtttttgaaaatgtgctcaagcttctattgtcttcatgttcaatttattatatgaccttgaagagaggtttatgttcaagaaataataatacagatctcattgtaattaccccataattatgcttcttttttctgaagaccatatggacctataaatgaagtcaatgagttaagagtagggagcattaaacatggtgaaaatatttttatttactgaaaaaattcaacagcgtattgtaaaatatttagtagaaaatgtaccagactgagaaaacatatttggagctccatttcttcagcttactgactctctaaaggcattcccctgtccttctctacagggaacttccatattttcttccaactgtccatttctagccaggggtaagcagatttatctttaagctgttacctgagtggagcctgtatcagttctactcatatcctattgatcagagctgctttgtatatccatacctcactgcaaaagaggctggcaaatagatgctctatctgaatatcaaggtatatatttaaaacttggggcctcttttattataaggagtaagaaagagattgatccttgaagacagccttggctatactaggaatgtcctacacctaaaaaaattagctggcagaacattagtcaacttccgaatagatgcttttaatgaccatgagttttgtacttttattgatagatcccattattatcattttttaaaaaaatcagccaaagttaatgaaggcctcttgagtcctgaggaaatatatgcacaaaatcccttcttgggatcttcgactgtttcttacatgctttgccttatagactcactgctattctagtcactcttccttccaaggacatgctacagtttatagtggccctgctgagttattgacccaggatattaacctggttatgaaaagctagaatgatcaagctacagatttggattattatattttgttgaacagtgcagttattttcatatagataaacatttctcttactgagaaatcattttcttctgggtactgttgagttcttaatttaatcagagaacattttatgtgtagtagcaaacggtactttcagtgagcttaaattttgatggggaaactgacagaataatttgcaaataaatatatgatatgaatttaaatagtgatgatttttggatctgtggctctactcaattatgtttctttcttgctaagagtttaagatattatcgaggttaccaaatagactatttatttagcacttttatatcagtgtttagtttccagaaaggtgaactgggtagccatgtttatattgtacaagtgaagtcacattgatattttattgcaatggaaacagtaagtggtttaaaaggaggaatggtgaagtgaaagaaattatcaacctgtttctttttatattattatctaaaactagtcatttttctgtttttctcttttgcattttttctcatttaagatcataagtgcctgttttaaaaagcagcccaatgagatgaccttgttaaaactcctgattatttctcagtatcgtcaattaaatgaaccccttattgtgtgcccacaatgtacaaggaattatatatacatatatatatattttttttttctttttttttcttttgagatggagtctagctctgtcgcccaggctagagggctagagttcagtggcgcagtctcggctcactgccagctctgcctcccaggttcatgtcattctcctgcctcagcctcccgagcagctgggactacaggcctggctaattttttgtattttttttttttttaaagcagagatggggtttcaccgtgttagccaggatggtctcgatctcctgacttcgtgatctgcctgcctaggcctcccaaagtgaggaattatattattattgtagttatgcaagttgaataaggtaatccttgccctcaagatattgaaactttaacaagggaaataagacatttgcacaagtaaataaaatacgataatactttaaatgtgatcattgtttttcagtattagtgttgatgcccattctacatcttcctctaaagaaaagaagacaatttgcaataaacctttggaaaggagttttgttgcgtctgtacttaggcaaatcgtgactaagaagttattctcctaatggccgcacatggtggctcatgcctgtaaccccagcactgagaggctgaggcgggtggatcacctgaggtcaagagtttgagaccagcctgagcaacatggtgaaactccatctctactaaagatacaaaattagctgggcatggtggcacatgcctgtaatcccagctacttgggagactgaggcaggagaatcgcttgaacctgggaggcacagattgcagtgagcagagatggcgccattgcactcctgcctgggcaacaagagccaaactccgtctcaaaaaaaaaaaaacaaaaagacaaatatataccagataaagtcctccaaaaaaagagccaggaaaagagaaaggagaccaggagggggttgcatgaagaaaatttagtattattatccagtattgccattgtttaacataatttgagttttaatcaaaatttacatttgcataatttaaaaaaccaaataaaatgtaaagagccctgccttatcattttcctaggaatttccgtgcttagagaaaacaccttcaactcctttagatgtttattctgggctttcatgtctgtaattctgggttttacatatatttcaccttgatttttaaaatgtagatattatctattgtcttcctcctatagaagatgaatgtttagctcctttcacctcctgcttagcaatccctttatttggttaaatcagtattcagagatttctttattatgactatataaatttactgtacagctatgccatataatatgatttgactatattttctttgctcaaaaaatttgtcttccttagtttttcaggactctctttggcatttctaggaaacaaaactctccaagggaactctgttcaagaaatctatcaggttttgttttttcccactagatatatgagtgggaagttcaggctggttgatctttagttctgttgcacagctatatccaagggctaacatttgctgctatactagggatttccttcccctgtctcctatgttggatcctccatttcctgaatcctacacgttctctcttcttggtttatttgtgtatttggtagagcacatgttctagtagcttctgaaaaagaatacaaggagggaagtaatttgaggagaaaattttgaatatctgaagtgtctttattgtctacaagtgtctaaacataaagaacgatttgaaattttactattatatgaaaacttttcattaaaaaaatttaaatggttgtaccattagctgttagcaatgttaatcagattctttcttcttttctacttttttttttttttttaacgacctggaagtttttaccatctctatatccctgggcactcagtggacccttttgcctatcagtgatggttcttatgttctgagaaaatctgcaaacacattcatagcaacatctagactcatgttcgaccaaacagttggacaccaagcctagccaagttgatgcataaaatcaacaatcacaagcaacctttcacataatgcctgtttacatacttgttgagtccagactttctttagtttaacttctaaaggaaaagcttactgcatcttcctgaagtgtaagagggacaacttcctggttggggaaggtatttagcacaccttatatctgacttcggaaatctctggggctttcaattccaaacctttctgtctagagttacacaacttgaataaattagcttattgtcgggctctccactgcaagagcttagctttttcttataggtatctataattgattgtcatttttctccttctctcttttttttttttttttttttgtttatttcatctctggggatttcaggagggaaacattattcaatctaccatgttttactgacaatgttcccctagtgtttttgaggttttaatcttttcagaccaaatctttgcagacatccttgagccctctcttttccccacaacctttgtctcatctaataaaaccaattctgctgattttaccttcaagtatatccagaatttgaccacttcttgccacccttacttacaccagccaggtccaagccaccttcctctgttcctggactattcaagtagcctcctactcccctttatctttcttccatcacttctcaacagacagccaaagtgatgctgttcaaacttgagtaacatcccatcactccaccttccatttgcttttcaccatagctaataagaaacaaagttgatattctttaataatcctcatggtctataatgtccatgaactctctgacctcatttccacaagtcttcagatcatttcttcctctccagccaacaagcctcattgctgtccttcacaactgttcaatgctctatctcaggcaggtataaaagtacctccatagcagtgctccctatatattttctgaattaatggataattatatttcaaaaatacctcagtggcattctcctgtttttaggtgtgagcctagcaaaggtctgtggtgtttttttcacaacacttacgaaaagcgttgtgttcaaccttgcaaatgaggaaaaataacagtgacctaagtatcatatattttttaacaaaacaagatatagtctgcacatattcatagcccacgaaaagagcaatgtgtgctttggggtggacatttttttattttttattttttattttttttgttttgcttcagaaattccactttaatgtttttttttttcctggttttatggtctcttacagtaaaacttgcattgaaaagagaaacccttatcctgaagtatctttatcataaacagatgtttgcagtagccagccctgcaatgtgcacagtaaaatgtgctgctacaatctgaagctttcatttacttatttaaacatgtctgagagacctagatcatataccacaggggcagacagcatgctggtgtgtgagcagtggggcatggagggagaaggatggggtaggaagggatgagtagcaagcttaaggacttctgcctccctttcatctgtgattgcaaatactgctgacccatagtagatgactgcacatagattcttgtcccactttcctaaaaaacattattaaggaaggtgcatgtaatgaaacctcatgtattattaacctaaccttactacgaatgtacaaggaataggtttaattcaagtaaaatttataggcaatttgttaaagcagcagtgcacattagaaggtacattagagacacattggttttaatatgccattcaataacttgaacagaggttaaaaatgctgcttaacctccattaagtattttaaaaatgctttaatttaaaattatttggagtgtgtgtacatatatgaatgtacacatatccacactaataaatataacactaaatatgttttcccagttccctttttcagtgctggatgaccttataatgttcagcagtaggcacttaatcagaggccaggccgaggaaggcagggaaggatgtcaacgcatcccgagccagtgacccacccttgtccttgagaactagaggcagagagtgcatattgaagactctgtagctttggaataaaacaaaggctaatttataatgaaaacagcttcctatgacatgttttgtactaatagggcagtgcctcctgcttccccctagtatttacttttggttttcttttacaattcataaaacaaagtatcttgtttcattaagtagcacatcatatttattaagtaatgagctcataaactagaattgtgtacaagaccctgccaatggaattggaatcagatgctgatgttccattaaaaatcaatgcatcaaagttgatatccaattatgccacatttcctagtgtttggtgagacaactttctaggttaacatgtttttcacagagagacctgaatctaaaagtaagaacctcttccttgataaatcatcaggaaggaatcttgtcacaggaaatacagaccacaatcttaggtacatctggaaaacaaaaaaaagtaaaagacactgataagaaaaatttctctgtcatagaaaacttgctaattgacaattacaaagatgataatagataatgtttactgagagtccgctgtgtgccaggctctgtgataaggttttgcctgcaaactttcatttaatatgcacaatatttctaagatggaggtgctgggattattctcattttaatctaattgggggaatgaaatctaattaagtagaagagccatttataagtccaggtccatctgactccagaatgtatactctgaaagagtggaactttttctttttctttcttttttttttttttttttttaagacggagtcttgctctgtcgcccaggctggagtgcagtggcacgatctcagctcactgcaagctaagagtggaactttttctaaataactaactcaatatttatcttacacattcacacaacaaatatttgagggtgagttagataaatactgtttatttcatccactttcaagcatacctcaactcatgattctggcttactgcttcacattctgggatacctcatttgttgttcaaaacccaagtagtaggcataaaatgaaaattaacagagtcctgggaaaccacagagttcaaataatgatgaggtaaattgaaggggtctagaaatggaattatctccgagaacttagttggagaaattctggagatggttggaatggcacaggagacaggctttagagcatgcatttgataaacactgaatgggaacagagaatataagttttgctgtggattttgaatatgcatacacatacatatattaattataatctccaagatgtaatcagagttgtcattatttgggttatttgttgttattggatttgattcttagagaatatgttaatgagggcctttcatgggtattcacataaatagaaaaattggattatttatgaaacagaaaattccaataatgttttcccttacatgagcatattattatgtcctttgtttaagagctaagatatagttttagggtgacattttctttctgcagctctgttccatctgttgctgtgacgagcactatattttaaatttattgtgtctgatccatatacactcctctctagactccctgataggacaggccactctgaccaaccactctcatgactcacagatttatgtttaccattttccttttcagtgttaaagggatcatctcatattttagaggatagaagatatttatccatctatccacccattcatccattcagctatctatccatttcattcatacatctgtttttcaataaacatctattgagtaaattaccagagactatgttggtgttaaggtatacaatcacaaatatactaagacattgtgatttagtaggggaaactgactcacatgtaaatgtatcacaatgtgatgagagccatattagaaatatacaatatagagaagtagtaaagtgaaggaaatgattaattcttgaaggatgaggggtcttaggaacttagagaaaatgatttctgaactgacttttaaaaggaaataggaatcagcaagctgctcaagaagggagtagcagcccagaaaaaaaaaataacagcagaacatttaaagcatacctaatttaattgaaaaacccttaaaaattgttttaaaaaagagaaattataccttgggatgaataatattaatatttatgtattcacttgatcaagtctagaagtaattttagcgtgattttatataaaactaccaaatggaggaaaattattattgttttaatttgaaaactaccatcatcaactatactgaaatatagtttacaaacaatacaacaatattgaaaatattgattcataaagccattaccaagatagtcttttgttgcatggatataggtgagccacccatccctccccaggctcttgtgtaactattatgtccattttctgccttaaggtgagagtagtttcttctaaatgtcttacaattagtgcttagccccagcattgccctcctttcttgaataaagcctagaggttacacttcttttctttctccctctcaagaccttggcaaagcctagttgttcatggtcctcaggagagacattgctgggaaatgggctcttcttttatgcccaggacaagtactgtgctatgcaaatagccgctgcaggagataataccagctgccttgctaataactttgaactctgtagattcttctcctaggcaaagccacactattttacaatatgggtgactctttgttttagctggatgatacatttttttccacttgagatttgtcatgtctaaaaccaagggtcagctaaataatatgggaaaataataaactagcgagctgatttggaccatgtatatgtgaactctcagcactacgtaatgcaaggtaataatgttgtcctaatgaccatgcttaagaatgtggtacaaaatcattcatggaatgaaatctcaatatgatcagttacaatgctacagatatataaagatttggaacatgaagaagagctaacaaaggggtatcagaaatgcattacattaaagtaaattgaggtcagttataattaagccacattcaggagttgatgtttaagtggaagggaagggaaaagattgttttctatagttggaagtcataaaaggaggtaatggtctagaattaggcacattcaggtaaggcaagaggtaatctttaagcaggaagttacctgagtcatcctaattagaactgcttaaaaataggacagctaaaatactggtgggattaacctttataatcaggctcctgagaggaggaggggaattaaccccaaggcaaattcccatgcagtcttttcctggaagccctaccttcactttcagtctccctaggtgctttagcatctttttagttcttctctgcttgtacttctgatttttctgtgacattctttattccccaaaacttggactacccaacttctgcaccaaaatgctatcccctacttgtacttacaggtttatctaatacatcatttcttctaaaaatcacccttaatttttccaaattctctgtggcttggagctattgcagtaagtctaaattaattctacttgtaagtatctgtgctaatgggtaatttatccaaattggagagctgttagcacattcatgatgccatcatcatggatttaagggcctagataccttcacaggaagaaaaatacaaagaatcacaaccacagtggccttgaatttaaatggaagccttctgaatttgactttgatcatgtgatgaatcaggtacaagaatatatactaattgtcatggccatgctctatttctggatatgtatatataagggaaattgctgtcaggtggtacaaataaacaaatagcgtaacctggctgtaaattatgataaaaatgatagtattagttgatttccgccaactgaatggcacatattttgagctctttcttttcctctcattgagcacaatgttttctattttgctgcccttgaaactttgtaagacagaatgtataggatctaggggaaggaaaaaaacccaattgttggtaactataagaaaatggcttgttttcaacaagagcctggaatgagttttagagtatcctaattactttttgctgttccctatataatagataagagaatagattcactttttgctcatgctctccttctttcaatatcattgctattttatgaactttaaattagtgtcatgacaattgtacaattcatttttatttgctgtaactgtattcattagaatccttctgtgatccttctaccccattgtttcagtaaaattctttgcagcattttgcacgggcttgtgtgtgtacccatgggtctgtgcatgtgtgtatatgtatatgtacacatacatgaacacacacatcacacaacactaagaaccatttctccctcatatgcctgctccacattcaactgcctgataactttctaattctataacagttaacttccatctcctgggtctgaagagattttaagtaatttgaataaacttttgaatcatatttgtatttctttcctttttccataagaaaaaaaatatgagttttagaggtaagctaaagtctctaaattctgcaggctttttttgtgtgtgtactacttgcagggctcacagcctgtttaataattgaactcatttttatttgttcatcgaatgtgtttggaatgcctactatgtgccaagcagtgtactggctgctagggagacaatgatgaatgaagcagatgggttttctgcccttatggaagttagattttggtggaaatgagattgattataattttcatgaacacttaggaaacaaacaggatgctatgcatttgtaacaggtatacctagcctggcctagggaaagttgcctgaggaagtcacgagacctgacttacatgagtgaactgagcaacagagataggtcaaaatcatcccagcagacagaacggcccatgaaaaggcctttaggtctcaagaagaggaacaaatatgactgcaatggactgagcggggggatgagccatgagctaaagctagagacgtagctgggacctgactgtaggattgaaagctgagtgagagatttggatttatttcctaaagggaataggaagtcatcagttagtttcaaatagagaagtgaaatgtccaaactgcactttggaaaaagactgctacgaagaatagattggaacaggacaagagggatgcaattagaagagatggcctccgggactgggtggtctgggtgtaaacctgggttttgctatccattaactctaccattttaggaaagtgtgttaaccttctcaatcttctgttttccaattgacagaatagatgtaataataattcatgcattatttgcatttctatgacaactaaatgagatgctcaagataaagcccctacagtagcatctagtttgaagtattagttataaaaaaagtggttggtgactttatctgggaggtcgtagcggggatgaagagtggaaggtttaaaattgttaggaggcaacatccataggacttggtaattagcaaaatatagggggtcagagaagtggaggatgcaagcttttgttttagtaaaatacagaattagtttaatttgaatttcagataactttttttagtctgagcaaatgctgcatgggctgcacctttgctaaaaaatttcattatttgttagaaattcaaatgtaactggcttcctatattttataagtctgccctaccaaaggtacctcagtgttctaggcaaagcaactgaatgactggtaatatctgttggaatggagctgattagaggaggtcaagttttttgtagaaatattgaaatattgcatggtagattttaaatacattgaattgtaggacctgggaggcacccaagtccaatgtagataatttactcagtttttctttggtcataattgacacactgaaggacagatataaccacatttgtattgggaattagtgccttggtagagtattctgtttttctgtgtaatcaattattatgctttaaataaaagagtggataaaaagtatatataaaacttttaatttctttatttctaggtttttatatttctccaggcaatgccactggctgcctgccatgctcatgccatacaactggtgcagttaatcacatctgtaatagcctgactggtcagtgtgtttgccaagatgcttccattgctgggcaacgttgtgaccaatgcaaagaccattactttggatttgatcctcagactggaaggtacatctttataagctttaataatttaactctttctttagcaacagttaactttttttggcagttgcaaagcaataacttctgtaaaaagtattttttttgcccggcttggtggctcacacctgtaatcccagcactttgagagaccaaggcaggcggatcacgaggtccgaggtcaagaggtcgatatcatcctggccaacacggtgaaaccccgtctttactaaaactacaaaaattagctgggcaaggtggcatgcacctgtagtcccaactactcagaagtctgaggcagaagaatcgcttgaaccgggaggggtaggttgcagtgagccgagatcgcgccactgtactccagcctgggagacagggcaagactctgtctcaaaaaaaaaaaagtgtttttttgttattgatatgttttttgttccgtgacatccacatttacttaatgtatgctaatctttgaatatttcctagagtgggttgctatatattgatagatgtggcccatcctagcatctgggaatgttgaatgagataaaatatattttctctcaaaaagctgagagtctggatgtggagaaagacaggaaaagacatatctgaagaagaaaatacacatactcatactttctctctctctctctctctctctctgtctctctgtgtatatatattatatatatatattatatatataatatatatatatatatgggatatatgtatgtgctttgttcttcattgcccttgaatttattgcatatttattagttcattgcatctatttatattttccttgcgtttctaatttagctttaaagactggcagatgagaaacatagctttgtattctgtgatatgatttttttcagtatgtaaagtatattatgaaagtaaatcatttttcaaagttacactctctttaatattctacttcttattctctgggtatctgtggccatttgccttcactcatttgtgtttattgctgtatttttgaagatgtgctataatgccaattctgtgtctgtgtgtgtgtgtgtgtgtgagagagagagagagagagagagtgagattatgagcttgtctaaagttcagactaaatctatgaattctttgaagctcctatccctgagaagctagtagtgtgtgctgaactcagaaagcatgtaataaaatgagtcaaatctgtctctcaatatgtgtatatttataaatctaattgctaattatttcagggtttgtgattatctgggctcttttaaactcattgcccccctgctgcctgccttttggctgttccactcctcattaacacctccattagagggtggacaggtgacagggtaattactgaaaaagaacttaaactagttcattttgactttcttttaaaatttgatgtgatttttaaaaactacaaaaatcatttaaaattttattaaaataatttttgttttcttgacatacatgcatatattttaatctgtgacgctctacttctatcaccgtagaaatgttaccttgatggtctgagaccattgtgactcttttctacagatgttattataaatcatctaaatgagtatacaaagcgcatggtacagtaaatagtaaataaaaagcactgtcaggattttgatagtaaaataggagccagttactgcacatactagctcctagatgtaatttttttgaaataatattctacagattccccagttggaactcttgggctggtttgtttcactcctggccacctctgtctttttcatagttctgaccacatttaccaggagaaaaatatcttccccaacccactgtcctccttgcaacactcattcccatcagtgccattttgtgacattcaattacccatttttgttctactcatcccctttgtcagtcttcccagggttatcagcaaaacgcctgctcagtgacctggggatgtctgattgtctcagctttttcacttaactttttttctttaagtgagatctgattcccttcattacactgcttcctctaccctacaatgttcttaaattcgtggctgagccttttaccccattctgttcctctcccattatctacccatctcactctcactccccaccttactttagtccaggaacaagaattgcttaataagtactgttccatcacctgtcactctgcagtaggcctgactagcactggagctagattccctgggttagaaggtggatttaaatgtttacataaattgataaggaataggaaggaccaaagaagtgggtataagctacatttttagaagataccgaagttacaataaagaaagaattcagtctaggcactatggctaactcatgtaatcccagcactttgggaggctaaggtgaccagatcccttgagtccaggagtttaagaccagcctgggcaacatggcaaaaccccatctctgtaaaaaataaaaagttagccaggtgtagtggctcttgcctgtagtcccagctacttgggaggctgatgtgggaggactgcttgagactggaaggtcgaggctgcagtgagtcaagattgtgccactgcactccagcctgggcaacagagcgagaccctgtctcagaaaaaaaaaagcaaaaaagagagagagaaagcagacttcagattcgcaaaaagaatgaggggcaggttggagtctagaaaatagagctaaagtatgagaagctgagtagatttctaaaaatatgaatgattcagattaagtgtggggttttttttttggacagagtctcacactctgtcgcctaggctggagtgcagtggcgtgatctcggctcacttcaacctctgcctcccaggttcaaaagattctcctgcctcagcctcctgagtagctgggattacaggtgcatgccaccatgcctggctaatttttttgtatttttagtggagacagggtttcaccatgttggtcaggctggtcttagactcctgaactcgtgatccgcccacctcggcctcccaaagtgctgggattacaggcttgagccgagtgtgtgttttaaacaaaaagatccacaagttttatataaatgagtttggatatctttacatattagttggctcctgttatattgatgggggtggtgagattacctttttaaaattacaaattgtccttggaaatggtcgcacttttcttccatccctgtattagtccgttttcatgctgctgataaagacatacctgagactgggcaatttacaaaagaaagaagtttacgggacttacaattccacatggcttgggagacctcacaattgcagtggaaggtgaaagacacgtctcacatggtggcagagagaagaaagcttgtgcagggaaactcccctttttaaaaccatcagatatcgtgagacttatttactctcatgagaacagcaggggaaagaccctaccccataattcaatcacctctcactgtgttactcccacaacacatgggaattgtgggagttacaattcaagatgagatttgggtggggacacagccaaaccatatcaatcccctttgttcttatctttccagttccaggttttccttttcagagggattctatttttctcccttttctaactcctgccattattttaaactactttgacatgtactgatgcagttctttggcctcttcattcattccccactccagcaacccatttccatggctacaccctggattttgtgatcacttataatttctctatttctcaaatcttcctaatcccatgaatgctattctatggatatatcacatctttccaattccaattcaccctggaagcctcacataacctgctccttaacttctcttaatctttatcccattatccctccttaatcctcttttgatcaaccccatccctaacttcactgtcttctacttctagcctgaggcaaaacctttttaattatgacccttttgagtacctgattgtgggctcccttctgctgtactgtggggtcagctccagagacgatcaccctacacctgccctgatctgtgaggacgtggggaaagatcatgtgcctatgctgatctgaagcactaccatgtatgtacttcttatcaatttactttctttccccctttaaactcctaccagtctcctcagttttaattccatgctcttgcccttgcagataatctggccctctgctcatagacaaaataaagccagatatatgtatctccagattatcttttctccacctccagcttgtctacattgtcacacatttttaattttttatctagtcttagaagaaaatcctgtgtatttttgcctaaaaataacctgttcccagtccttgatatgatcccttcctgttttcctactcttgttcctccattccatgatctttgctccatcaaatcctccctttattttaactcaaacatctctctataggtaatatcataactgcctacaaaaatgctattcattctacaaactccttcctttgattctgccctgctttatgagccctgaaagttattgtctaatctctcactcttcattcacttactaacatttaaaaagagcactatgattcaagaaaacatgatttaaaaaataaaagatcagattttttttcttcttcattttgtttctttctcattcattctttattcaccatgtgtggtacatacatgttagcagaacatacaagttagcagaacttgcaacatgcagacattcaagaactagttatgtgactattaaattctcatccaaatcaaagacaaggtctataaagagatataataaacaaaaatgggttaaggaaaagacagaatgagggaacaggtttcactggtgggaaaaagggaggggtcagtggtgctttccacttgagtccagtgagaaggtcttatttgatcccttgaagggtgacatgtgtctcctgcagttggagagaccagtgcattgatatctatcttagacctggcaaatctaactgagaagagacagtctacccaggtttggataggtaagctagaagacagtgccctgcatatcttagactcccagagttcatcatgacaaggaagactacgtatttctcatgaccggatgaagaccacaaggaagaaagacagggtaaggttgtcttagtctgtgctcaaagtaccacttagaagataaaggggcctgtgtagaataaaggacaagattactgtggactacaggttaataagcaaccagtcgaaaagaaaatgcatctgactgcactaaaacaaaaggtgagagatacctaatggtgagaaagatcaatgaagaagtcaggaatgtaccactgtcagtgataagtcagttttatgtatatgcaggaccagagacaatagactgctttgggtggttctagtccaagtgagtttctacccttcctgcagcctctacgtgagggaggaggctaaccaagctaccttctctgattatagacttgctgcctttatcatgtcctagcttgatgaaaggaagagaagtatgttcttgaaaatgtctgttctttaaataaagattggaatgttgactaatatacaggattagactttctattttctgaattgaatttgtattttgcaatgtaaagtaactgtaggacattctattgcctgagaaagaccagaaaagccaagtgactaactcattttatatccacatggaacatgggggaattagctccatattatatgtttaaagggtcagtgaaagacaaaaataaaactgatttatgattgcttctcatgacttatggtttctcaatgtgctggtcatttcattgttcccatttatttcttaaaattacctcttcctttggtttccaagattctacttctcttatttgttttctaactctttttttggctactcctttttaatatgtcctttcaatttccacaactgtgtccctgatttcaaccactacatacatgttaatggctttcaaacacatgatcacccattcagatgcctgccacgcactctaggcctgtagccagctgtctctctgagttttacgcttgcaagtccctcgtgcatttcatttttaatatagtcagcacagaactaaccattacttcctcatctccacccaaataaaaataagtcttatgccatctcatgctatcatcatcttggtgaaaaagacgtaaaacttcaaataattattcaagtccaaacttcccaagtttgagtggggcttagattcttctcaggtttggcagaattggctctgttgttgagtagaatgagtctacaggctactgctggaaagtgctatggaaagcaagagctactgtatataatgcagcttctctaaaaagaatagaaagaataaagcttcccatggccatatgggacccaaggagatcagcaggatttgtctcttactaaatcagtcgtgtggaatgctggtaacttgacttgaccctcctatcccactgatgaattcagctgtctcttttcacttcaacattgataatcattacacaggaaatcctgtagcacagaagggcatggagaaggatattttaaaatgtgacaatgagaattgcttgagtttggacttttgttcaacattgaaaagagataaaagtgggttctttttaatgtttttccattcctcttttgaatgataccgttcttgaatctttttttgacttctggttgttattgtatatacaccaacattggctatattgaaaatgtgtaacaattgactaagatatatgggattccatcaagtataagaaatttttgttttttaaaggaaaaaattcacatgtaatgtaaatatatacagatatgcagtataggaaaacagctatgtcctaatgttaaaacaatgtttttgaaaacaaagtagattcaaaatcatttgaatctactttgaaatctaggcactgtggtaggttattacaaatagaaatgtttacatttataaaaattacattccaattataacaaatggaaattaaaacattaattttcaaaatatacagtagattataagtaacttattattatgaaaggggaagatacaagtatcatattatttcttcatcaacttggaaaataacctcacttccttatctgcctggttcacatattccttaccttcttcatgctctatttgttggatatagcaaggtttgctatattgttttctcttggtttatttgctacacagttttttgtattcccaagggcaaaataaataaaataaaatagacctcggccctaaactacacaaccaacaacaaaaatccaggcaacacaacaatgactttttgtgaccaagctggaaaatcatttgcctgtttccatctaagtggtttattcttcaaaagttactgaccagaaaaagggggcatgtattttaaaaagctgatcctagtgcaaacattactccatttacctctgacacataaagcaaacatgatttaatcagtatcgaaaacaatgaagcaaaaaaaatctgcccactgaaaaatcaataatgcaaaaaagtatatagtgtttgtctaacccaaaaacaatgagacaaaaatgggccatatttaattcatctcagttggtagtggagacccatatttgacaccctgcacttactggcactgtcctcaagttgacctgtgactatgactactctcccccatagcccccaggactgctccagttcatctggtaccccacagttttcttacataacaaccacacatcacaacccccaaaagtttcttccctaatgatataccctctctatattctatgttaccttgttttaagccttaaggagttagtggtatcactatttgtcccatttactagctgacacacactgaagttgtccatagagggtaggacaccaaggctggttagggagaataaaggctcagacttctggagcataaaatacagggaagttcttctatgcccagattatttttggttttactgcaaatgttctacatttcagcactaggttatagatttggtccagtaatcttttcacaggcctttatccgattgatctcaattggtcttttctctgagaaccaggtcaatgacttcagatgaaagcagataacttccttgtcaactgatttccttttatggtgtgataatggaaaaattagggagtgtgcctcatagattccctctcctcagtgactctttgtcagacagctggctgtcatctggggtgacagggtaaatgggccacaagcctgtcatcatctggcagccaaggcagggctttctcacaaggcagtggcagatttccaagaaagaaagcagaagcatgcaaagacacttgaggcccgaaccgtcaggatgttacttttaccttattctactggccaaagcaaggcacgaggcttaaccatgtttggaagtggtggggaataaacagactctccttttgatgagtagaactaattatacagttagctgcaaaggacctgcacagagggaaaggtgaagagttgtgatttttgcaatctcctatggctgccaaactatatattctctcttagtatagatgatatatgatctgataagaagtatcagtttttatatattagtagcatttattcaacgtgatgtaataggaataacatgcaactggacatcaggatatccaggtttcagttttgtcttttccactagaccagatacagtagcttcctattattggtggaataaattatctcaaactcagtggcttaaaacaacatgaatttttattatcttatagttctggaaatcagaggctctaaatgagtttcactaggctaaaatcaggcctgtgtttcttatggagattctaggaaaaaaaaaaacatttccttgattttcccagcttttagaggcaacctacaatctttttttttttttttttttctgagatggagttttgctcttgttgcccaggctggagtgcaatggtgcaatctcggctcaccacaacctccgcctcctgggttcaaatgattctcctgcctcagcctcccgagtagctgtgattacaagcatgcagcaccacccccagctaattttgtatttttaatagagacagggtttctccatgttggtcaggctggtttcaaactcccaacctcaggtgatctgcccgccttggcctcccaaagtgctgggattacaggcgtgagccaccgcacccatcgtacattctttagctcatggctccttccttcattttcaaagccagcagagcagtgtttccttggacctctgcttatgtccttacatgttttctctctgactcttaccctcctgccttcctttataaggaccgtagattacattgggcattcttggataatccaggataatctccccatctcaaaatccttaaccacatctgcaaaattccttttaccaagtaaggtaacattcacaagtttggaggattagaacttggatattgttggcgtgggcataatatgacctgctctaccagagttcagcaatctatagcctgggggtcagccacatgtttatgtaaatagagttttattagagcacaccaatgttaattctttacatattttctgtggttgctttcctgctacagcagcagagttgagttacaatagagctcatatggcctgcaaagcctaaaatatttactatctcatcctttatagataaagattgctgaccttgtaactagatttactgtcaccttggacaaattagtctcactaagcataatagaatcataactttatagactgggaaagaaccttaaaagtaattttggttaaactctaccctatacatttctctgcgtaaatcaccttttcagaaaaactggtgaatggccattcagcttctgctccaaaacatggaactaaaaggagctcactgtctcatgaagtagctcatgtttatttcaaacagctgtaattcttcaacaaatagaaatatattatttatattgaccaaaaagttgcagtcttttgactttcttgcctagtcttatttatgccttctgagaccatagagaataagtgaaatctctcttctatctgtgagcactttaaaaatttgattctgctatcatatctgaaagttatttagttatttgcataaatatgtggagtgtcaacaaaggagaaagagacagtgttctcagatcagaaccttgctgagcaagctgcctggacttagctgtcactattgcatggatgcaagggagtcactgcccctggtccagcttttatgagtttctctatttgtgcctgggaaattcaccaaagagggtggggttgcacactgttaacgtctccctttcagatgaggcactcgtatttccttgttcaataagccatgtaaatatggctttcagttcacacagcgtggatgcccaagcctcaaatccctctcctataattctgattccatctccaagagaattcagatgctgttagtagtctgtaactaaagcgaaactaagaagctcaatgaaaccacagctcctctgttaatcggggaaaaccaaactcctctagagggcactgtagcactcaccgaattctgtgaactgagaacactggtttaagagaatctgaacagataccagctcttaaagaaaactgtccattccctgggagtgaggttagccagggggacagagttaagccaataaaaaggggctcaaaagagctaacttgttactagagctacaaaccatgtttggattaatctccggtgtcctatcctaagtctaaagcttccctggtgctttattcactattaattcctgtatccgacaatatttactgaatccttactgtgtgctagcctttgtgttagggactgatggaaaaaactaagacaaaaacaaacaaaaaaactctgccgaatttctccaatttgccttgaagtctcattctcttttgtttattaataatccttatctaaaatcccttagcaattggagatctctttctccttcgttctttatgttgaatgatgtcttcatcatccccattagcaagttagaagaccgggagtaactttatacctatcctcccttctcttttcaattcggcctcccattctaccaattttacttaacatttctcaggtctatcctactcatttccattgctccttgccactgccccaaggtagcattatcttacttctgctcacctttccaggtttatctatcaccatttctcattatgaatttacatccaggagtactgaggtgcttgcaatttcataccctcttctgctttttcttttttttctctatttttgcccctccccgacttccctggcttatttctactcatcttttaacgttcagcccaagcatctcctccaagacttctacttaaaattacccttcccatcccttcttctgctaccagactagttaagttgccccttttctggacctttagagtctggatacatctttattaatgctgtttccgttttttcttgcatacgagattgtgagctccttgaggaccggggcaattctataagattcatctctacatccttgatgtttattccagtcctggaacatagctggccctcaatgaatgttatttatgtcaatcaatatttaaatcaatttgatagtacccatgagctgaggccccatagagaggaggggtgtacaaagagaaatgtcaataaattgacctatatatcttgggatatatctctgggcctcctacagcagttctccctcagatgatgaattttctgacaatgatgtgcattactgaaacatattcctttcattaatagttaggtttcaacagtaataattaggataaccatttctctcactgtttccacaactggaagaaattcctaagaaaggaaggtatatgaaatttgtgatgtaggagacagaggccaacttctttcccattgtaaccagcaaatactgagttatgtaagggtccaaagagaactatcatagcaaagtgctggcagagattagtgatgctttactcctgttttgtttaccataatgaactggtcaataaacatcacaaattgtttatctatataaatcttgacagattactctttatgaaatccatttagcaagcgaggttttcccataaggatgaaaaatgaagattttaaacagattgcgggagaagctctggctgtaccaagagagtcagtgtaataaaggtttctttatattaatattacaaaaaccatttatcctggcaaaatcaatattgcaattcatcttagtttggtgtttctctttctaagcttaaaatgtcttttcctttattatgtataattttgttttaataaatgtgaaatatatttcatttaggaggtactcttgaggagggataacttataaaatgacatcaaatttgtagcttatttgctaaagagtcttggaagtgtttaaaattatatttgagtggctgagaaatctaaaggaatcattttgcttaatccttaattacaaaattatccctgtgtcctttggggtaaaaacaaactacaattttcagaaaagtcttcgcttgtgaacttcatttaggaaaaattctctcttactgaagtcaagtgattataacaagtcagataagttgactataacaatggcttggataagagactataaaatcaagaatagacacatttaattgctcaaaacattgcgtgctttggctggaagaaaatagaactacatcaaggaacggaattatgttatacattggaagctattactctaaatgtactgtatgtaaaataagtgtgattgtctcatgagtgaatggtaataaaaactgaaatactcaagagacacttattcatgagtggtgcagttacacatacatatatacacacacacacacacacacatacattgagagaagcttttctcttattgtttatgctcactaatattatattaaaagcctataaacaatagactctacataatagcctataaagaaattaagagcaaatcaagtatttttgcatctataattccattttaattataatacataattttcttcagctctaaaacttaacctaaacaaaacatctatttgaaatggaattctgatgtaatgtgtatagataaaagacctaatatagttgtttgaagggggaaaatgtccttttatcatgaccataaaaacggcaaactacagtacagtggttttcaagaaaaactgtactttatttattcccaaggggatattagtccataaaacaaatttgcagcttatttggcagtcttagcttttatcagcctttttaagggtgttgaatgattacccaagagatcacactgtaaaaatggcagtggggaaaagtaactccatccgttcagcatctttattagaatatataggtgaatccatttgatgttgttttaaacgtaccacaaggagagtaccttttaaatggtgagtggtcttcttacatgtgctgttttgcttctctaatacctcatggcaccaacgttgcttatcctaattagtgccattggcataggctacatgtttgaataattcactgtgaagaaacaagttttagtttctatcatggcaaaatgccactactggtatttttacaagcaactttgggtccaagaaatttaagttgcactaaagttatcttactatatttatgtcattagcatcttttcataaatcagaataatgctgtattctccaaccattatggataactaagtttagttcataaaacagaaaatgaaatataacccatattaaggcatcaaaaatatttgaacctgtctttctcaagcaattttcttagtgaaatttagtcttcatcgaactaactatagaattttaagatttttagggagagcaatgatttacccctgattttctatttcgcaattggagagtcacttgaaaagataattttatgggtacctaatctaaatgtttagctgacaggaacactgcttttgtaaaagcaaaatttacagcattcttaattgaacaactggattcaaactaatccataagatatattgtgggatgtaaaaaagcaatataatatctttttttgctattaattagtttataaagagaaagctttatacgggttttaccaggaacagtagttttataaagatcttttctattttcctttattttatgttgattctttgtttgtttagctcaagcattcttttcaatatattggctaaaacaagccgtcttactctacaatgctattggtaggtgtaacttatactatgaattattaatcaaaacactattctctttgatggtttatttgccttgttttcagatgtcagccttgtaattgtcatctctcaggagccttgaatgaaacctgtcacttggtcacaggccagtgtttctgtaaacaatttgtcactggctcaaagtgtgatgcttgtgttcccagtgcaagccacttggatgtcaacaatctattgggttgcagcaaaagtaagtgaactctggttcagtgctggtgtgtgaagcagcatcatacaggggactgcatctcattgttttctttctccatttagaacccatcagaaaggcttagtacaatgtgaagaacgtaggtaagagatggaaaaaaatacactgaatgaaatatgtctgcttttccttgattagacaattggaaatggtaatataattatgttcatggtgggaaatttacaatagttttttggagtgaaatcaacaatgaggtgattaaagtcctaggttttcccagaccaagggtcttcccaggacacaagacttttaatggtaaaatcaggactatattggttaaaccaaaacagttggtcaccgacacaaagacatttccaggtaagttatttttttttgacaaataaagggtgaattcttgtttattatatgtttgatattcttccatcccccaaattttgtgggcagtattataccattagttgtttatcgatattgtaataattagtatcattcgtcacgcatattattcatcccataattcatgtttctttctactttaagtttcactcatttaaatatctctcacatttatatttttaattccttaaagcctaagattacatgtaagtatcttttgacttttcaacatcgcttttcagtaccttgaattgacctcacaaggtcacctgcagttctacaatttcataacatattgaccgttttcctatatttacttcaagatcatacatccttaccctttccagaatccctaagaaatgcctgctgggaacatgtggtaggagccctctacaacatattgtgctatgcatattctccttggggtgtcctgagactgtcatgagtcacaatgataggaaacgccacaagtcatgacagatcatcacaaaccagcatgcctggaactctgctatctacatttaaggggggagggagaaagataagtaatgggatattggactccacaacaactgtactagattttgaggtaatggaaagcaggatatagctagtgattaagaagacgtattcatattttgtacctgtgtagtttctcttcagcatcccgcatttcatcagtccctctggatttcagtataagtaaaactgtaggtatttatgcttcttttgggaaagaactgtcataattcctttcatgtataaatacagtctaaacataaatctggacttcattggccacttaattactatgtgtcatttattgattagcaatacaattgattgctttgtatgcaacaaaaattctagcatattccttttggatatgagttatggatcgtcatttataatggaattacaatacctaatcttagtgatttctgattggttctgccactaattttgtgacaatattggcacctgctctactttttgctacctattccttcttgcatttgagacatagtctgggaattatctctcaggcaaaactggatagtcatgtcactggaaagctagcctacaactcttagtagtggtagacatttaattttatgttttattaactggacattctttccaagtgtttctgatttgttagaatttttaaaaactctcacattcctaatgattcttccctggacatattccttttggttttttatctctttaaaattatgatatatcatactgagcacagttcttcaactcttgtggttgttgctgcttctgttttaggtttttatttaacaaaatttttgaaacactgtgtaaagttggaagctcagcatcagcagaggcaatttattagaaacaaatgagacaactttcctgccttcagaggaggtcaaaacatagctagagtgatggacactgataataggaggggagcagaaaaatgtaaatggtgggatgaggatgaagggtcccagccttctctcctgttccagcttgattttcacatggtacttgtgtttgatcctagcagaagccagccagaacaattggcttcacaaagatatgatgaaattgaaaggaatgtagtgctatctattgctgacacagtgaactacctctgactagtatttgtctctgtatccaacagatgtcaagaaatattttcatttaaaattaaaatttctcatggtaccccaccccctacacagtttgggaactgcaggattataaccctcattatatcttctaggggccactagcaataatttagtaatatcatctgtgatttttatttttggtgggctgtcagggtgggaatcctaggatgtaatttccaaaatgcaagaggattgaatgaaaataaagtagttagaccttttcttatagtaaatttcccttttgggtgattcacttctttcctttaaatattggtatcatgctttcaaaatgatagtcattcttcttgataggaagcaaaacaagaattaacataaattaaatagtcctattttctgtatgctttcctagcgaatgatattctagttagttcaaccatctatgaacctaactaaaattatacacatacacacacacacgtatacaattagccacttattgtttgatagtgtttgtcttcttgacactattctcattgttatttattcatctttatatccacattttttctttatctctccttgccagagagcctcttctagctctccttttattaacagctttattaaagtataatttacatattatatatttaacaattttaagtatatggtttgatggattttagtaaatttagacttgtgcaatcattactataatccaattgtagaacacttctgtcatttcaaaaagttcctttgtgcccatttccagtcaatcatgactcccacctctagccccaaacaactagttatagggtctttgatgagataattttgcctttcccatgagttttatataaatgaaattatacaacatttagactttttgcaatgtataggcttttgtatctagcttcatcttaacaaaatgtttttgaggttcagtcatattgttgcatgtctcagtagattcttttaattgctgagtagtattttatggatacactatattttgtttatccattgatcagttgacatttagattgttttcagcattggtctactatgaataatgcatccatgaacatacagttacaagtctctgtgtggacatgcatctttatatctctttatatcctgagaataaaaaggctggtttgtataccaaatatatttttaatgttttaggaaactgccaaattattttccaacatggctgtattattttacatttacattagcaacttataagagatccagttactctatggtctcagcaacatttggcattgactctatttcattatagccattcagtgagtgtgtagtagtatcttgttgtgattttagtttgcatttttcctgctgactaatgttgaacaacttttcatgtgtattgtcattcatgtgatttttggcaaagtatctttgaaatattttgcccgtgttttagttgttagtcctcttactgagttaaagaattccttattaatttgggataaaacttgcaaatagtcctctcattctgtggatttgtttttcattttttttattggtatactttaaaaagcaaaagcttttacttttcatgaagtcaatttaccaagcttttcctttatgggtcatgtttttgtgtcctatctaagaaattttggattgactcaatgtgaaaaaaaaaaattctccatttttatcttacagttttatacttaaacatttacatttagatccatgaaataatttgaattagttttgtacatggtatgagttaagcatctaagttctttatttcatttttattttttgacacataggtatccaaatgttccattaacatttgttgaaattgccatcctttccccattgaattacccaagcatctatgcaaaaatgcagttgaccccatagctaacatcatattcaataatgaaagactgagatctaagatcagacataatacagaaatgcccacatattagccagagcaggtaatcaagaaaaagtaagtaaaagtctcccaaattagaaagttgattttctttacttgtagatgatatgattctatatgtggaaaatccaaacaaattcacaagaaagctactagagctagtaaacaaattcagcaatgttctatgttacaagatcaacacacaaaattagttgtgtttctataagccagcaatgaataatttgaaaaagaaattaataaagcaatttcacttataatgcatcaaaaatttaaccaaggagatgaagacttgtacattatctgttttctgtgtttccaggaaacctatagtataattgcgcaatgttatttctatgcactgttccttttatgcttagccatgtgctctccagtgtctcatgagtttcatgcaggatctgtgtgtgatcacttttctattaggatgctaagatagaagtaattttcccattagtatatattatctgtggtaataaatatattacttattgccaaataagccatttataattcttgggatgtaagaatcaaggatgccttccagcacactggagggtagaggaaataaaggtgatatttattgaacaattactttatacacatatacacacacacacacccctacatacatatgtgcatgcacacacacacacacacacacaaacacacacacaccttatcttcaaaataaccctgacggggagacattatcattctcttaatataaatgagaaaaggttcagagagtccaatcaatatttgactataatcatacaactaccaaagttccaaagctggagattcaagctggtggttcccaaagagatggatctagtcacaatattatactctcatcccataaaagagagtctggcatatgcaaagaccattcttggcaattttgatgagtgaatatgtgaacattttttaggaattctacttcaagcacataaaggttcaagttctctcatgctcaagatttaataatattattctcaaaagtgttggtaagtcatctaaaccttctggcttatgaaaatttcaacttaaataccaaagaggtactatttatttatgctgtggagtcagacaagattgtggttgacatggtcatagcaagtaatcagcttaaatgtttggaaagagcctctgtgtgtgaagaacttttgttgccaaggatattttcatgtaatgcaaatcattttctacaccctttgacatgggagtgaaacatctatctctctttcattttcattcatccccaaagcattttgctgccttagaaaatcatctgaaggtcagttttgattgctctaactctgaaatctgttgtgttcctgatagcatgcagagttttagatgaaatcactaatattcactaaaaaatgttaaattaccatgaattgcaaggttctttgagagtgctgtaaatgaggcagttgatgatatttgtggctccaccaagaacaacaggatttaaaaccctaaattaaaatccactgaaagggtcaaatgcattttcagtgttcaaccgatcaaagtgaccatatcaaatatggaaaattcatgaattcaaaaatgtaaggtgttattcggaaataattcttttctcatgtgtcattatgagattgttgctactcttttcctatgtctaaataggcatatagactgttggaatgttaatagaacaatgcaaattccaaagaagaaaaagacaaaaggagggcaatgagcatgtatctagtttgaatattttaaaacatatgatgtaaatattatctgccttaggatcagactttgtctttaggaagcctattcatagtacatggaattttatatattttacattcagtgctgtgcagaataaaacaacattttccccctctgttctcacaccaccatcaacatagttgaacaagcaattctgcagcattaatatcctacaatccagttcaactcttgcgctatatacctggaagtagtggcagattccacgggtgaggggtcagtccccaaggctgcccccaacttctaacaccaatcacaagctccaggttattttgcctgtgcttgtaacccactggctataaattggggctcctatgactccctccttgggttcaattactttggcagctcagctcaaaataaggaagcacttatttttactgatttatgatacaggatattgcaaagatacagatgaagcaatgcataggacaagatacgtggaaaggggagctgagcttccatgtcctccctaggtgtcacaccctccaggaacttccacgtgttaaactacatggagctctccctgtacccccaccaccccccaccaccccaaacaccctttttgttgttgttgttttagacagagtctcgctctgtcgccaggctggaatgcagtggcgatcttggctcactgcaacttccgactcccgggttcaaacgattcttccgcctgagcctgccgagtagctgggattacaggtgtgtgccaccatgcccagctaatttttgtatttttagtagagacggggtttcaccatgttggccaggatggtcttgatctcctgacctcgtgatccgcccgcctcgaccctttatagcaacttcattggataggcatgactgaagcatggatgtggcagactaccacaattactacttgagaccatcactacaacagttactactgttactatttgagactgtcattacaagactgaatgaaggaggatgaacgcagaaatgaaaacttaaaacaaaaataactattttacaggaagggtaacatggggaagaagaagaggggtccctgcttcttgtgagcaagggcagctgcctgagctgcttcagcccttcatatttattgggtagaaagagcagggaggaggagggcatgattggtcagctgcttgattgatcacagggtcatattattactaacaggcttcagatttgcctaataacaagaaacacttgtgcctgggtcatgactgccctcagcattccttccgggtgcagacgcagtttgtcagcttgccaacatcctgctttcatgagaacagtttgctgtttactcatatagcctccagtggtatacttagttgatcacgaccctcattcttttggccttcaacacatggacaactatgtagaaatgtgatttaaaaaaaaaaaggagtatgatttcatactaatcgactgagtggggaaaccctgcaaggctgcctattcagagtcttcttggcctctctctgcagtattcattcctccagggcatggggcaggactccttctaaaatgagggtctcatgacccacagtcagacaaggtaggtcagagaatttccttatggccggctctaagacagaaaggtggaggaacattagagtatatttttagtttccctggcctgccttggggagaaaaaggaacaggtagaagcagaacagaacagagacagaccctattttctgaggcctacttctgaagcctaaatctccccaatattgtaacaaaagactgtccttcacctgtatcactcttaaattgttctgaagctgcttcaggacccttggataaaagaccaatacttcaacaaaagataggcttattgtgttagtcaccaaggaaatagcaaaggctatggaagttatgagccaggaaccatggacaaaaacgtgtgtgtgtgtgtatggtgtataaatatcaaagtgctcttgaaatcctgtcttaaaatgtaataatttgattatattatatcttttagacagagttcatatattatatctattaaaaagagttcatcactcatgggtcctggtgaattagcaatagctctggggtggaagtctttgcttagtttgcagaataacttcactttactgttccctacttttccactttgctctgtcctccaagattctatgtggtttgcatcagcagcctccattgccctctggccatcagttagttgatttcagctgctaagagggacccaccaaacatctggagggcaggtggaaaaggaagtcaggatatttaattccccgctccctgtgtccatgtagaagcagcctcaagctaactgcatccctccatgagtggtcatagctcctgtcaggtgatgctcttcatacagtcatttctgtccctgagttctgtccccatttaagctagagatagtgtgcagagaagagttaacatagcaagcctgactgcttatttttagaaagacctgcttacaaagttggcctttggctgacatctggatccccactatccccagaactgataagagaggaccactgcacttaaacatttgtacaaagtacggtttatgcttaacacctgctttccttgtgggggtcttaaatttgggtaaatgccagatagaggctgctcataggaacagcccccaataaaaaccctgtgcactgagtttctaaggagcttccctgattggcaacacatcacacatattttcataatgcattgctgggggaattaggcccattctatctctactggaagagaattcttggaagcttgtgcttggtttcccctggacttcattgatatgccttttccctttgttgatgaattctgtaacatttcactgtaataaattttagccatgagtaggactatatgatgagtcctgagtcttcctagtgaatcattagacccagggttcagggttggcttgagaaaccctgacataaatagcaaaagagctctgcagttctgtacctgagagtactggaccatctcttttgcccacccttttgaaagtggttcctttattgagctctccccaagttactttttttgagtgtgctttcttttactgaggcttctagtgactgtagatatttcatataaaaatattaattatttgatggattcttttctgtaccttacatttacatatttcttaacaaaaagatgaatggtttaaaagtaaggtaacacagcaacctgtacccttgacatcttatttaaggagaatgtttgattaggttgtgcttctttaaatggatgggggattgtgcatcttgtttaaactagaaaatagtacgtaaactggtggttgattgtccctaaaaatatttagctgttgtttttctcctttatctttgcgtattctggtgaaaaaaaagaaaattcactctcaaaagcagggagactaagaaaaatttacagtgacagaacacaatgttttcatggtatatatttatattatagaaaacatcacttaagtagtgagatgaatgttcttatttcttatgtgcctgataagcaattgtattacatcttaaaaacacctctaacaggtgatggtacattcatatagtatattcaaatcgtttcttgataatatttagattatttaacatccatagctatttatatcaccaaatattattctttcttttacactgtgctctctgaagcaagataaagcattgtgcttaatggaatggaaagcttcctctcaaaaacccaaagattatgctacttaaatttcaagtttcaatggaacttatgtcaacttttaaattaactatgtaaaaaataaatgttgtgcatccttggatggtttctcaaaaaaaaaaaaaaaaaaggcaaagaaagaaatgcttaatgtaaactatggtggttttttacccccaactatatttatgccagctgctttgacctaaaaagtttttttatgcttatagataaaaagctttgttttagagaactcatgaaccctttgtttattaatgtcttggtaaaccacatgtcttcttgataaagcaatcctgaatcagaaagacctctttgctggatatcttacttcagtttgcttttctgtttattgattgctttgctaataaatgctctcttcattgtaatttagctccattccagcaacctccgcccagaggacaagttcaaagttcttctgctatcaatctctcctggagtccacctgattctccaaatgcccactggcttacttacagtttactcagggatggttttgaaatctacacaacagaggatcaatacccatacagtgagtttaagggtttggtaatagaaataaatattctgagaattgacacattagttaagttctttgacattgaggataaatgctgttgtggtttcctctgtctggcacagagtgtttcaaacagagataaaattacaaatttcactagtaatcaaagaaatacaataaaaatgagatgcttattatctgataaatactaatgcttatcacattctcaaagatgaaaaaaaaatgaccccatcaagaattgatgggaatgtggggaagctggaacttttataaactgctgaggtgtctgtgtgagttcattagtacaacttttcatgtacaataatttgttaaaatctatgaaaaaatctttccttttaacataacatttgacttagcaaacttattttaggaagtttatctcaagtgaacagtcattaagtagacacacaagatgtccatacctattctatttgtaacatcaaaatattgaaaatgattcagatgttcaacaatgtttcaggaaattatagtatatggcataacagaatcctggtacattgttaaataaattataggctatgatagcatataaactgataccttagttcacatatcaataaatggaaaatgttcatgacatattgtttaaggcaggggtccccaatccccaggctgtggacaggtactggtctgtgacctgttaggaacaggaccacacagcaggaggtgagcagcaggccggcgacattactgcctgagccctgcctcctgtcagttctgtggcggcatgagattctcataggaacaggaatcctattgcgaactgtgcatgcgagggatctaggttgcacgctccttatgataatctaataataaatataatgcgcttgaatcatgccaaaaccatccctcctcaccttcccatcctgggtccatggaaaaactgttttccatgaaaccagtccctggggccaaaaaagttggggaccactggtttaaagtaaataaagttattaaaataatctgagaattataccattttaatttacaaatactggaagacataataaatagatctagttttctctaattgtaaatattatagaaaatgtatcaaatatttctattataatgaattcaagttttttaattctcaggttaaagaactattaaatctggcagtggagtactaacactcaagcaaatagtgtaatttaatacacacattgctgtttccgcagagatagaacacagcaacataaacttttgaaagagaaaggatataaacaagccatcaagcctatctttgcctttgtaacttttatgaagattttaaaggagcttatagaaatcaaattattagaattcattgactttaaaaaacatttactcagatgttttagatacagtttccctaaagacagaatgaaaaaaataggaatttttacattattccagctctatcttctctgatttttgcttctagccatgtttagctacacactagtttaagaaacctcggaacagcaattccaattcaagtttctattttgttctcttcatttaatacacagttttccaaattctactttaaccatgcttaattagttggagaactgtttaaagctctgtcgaaacactgaaattccataaccttccttaaaatggttaggaggatgccttgttttaacattttaattgactttaaaactcctgcatcgcatagagttttattttgtatgcattatactgggtttcattttgcacctaattcatataactggaatttagtttcttatgtccacccctttctcttggctctacatgtctcttcagtattccaagtcttctttaaagttaatggaaactctgaacttcatgatgcagattgcaaagggaaatgaacatctgtctacatctgccatgttggcaaagtatcctgaaaacctgctactagaatgtttattttcttccaaatatcagcatgatccaggtgtcctgaaacttaaacttttgtgacagagaaagagaggagttataaaaatattgaaaatgattttgaagatgacagtaccactgattatttctgaagttgtgaattagggtcaccctactttccatacagcttaatgcaatagcaaaattaaacttaaaactatcaatgatattattcaagccagaggcatgatttccatagtaacatattgtgatctattttatagaacatcacatgttagtacaacattggctgtttttgacgattgcactaataaggaatccaaataacattttcttacataataaatgtgtattcattcactaatcagacatttatataatcctattaaacaaggtatcatttcctaaaaccatatttttcattaaaaaatgccacttctggcatttcttgacaatcactgtaattaatgatgtgaaaattatctgcatgatggcatttgaacagtaagaacaattggttaacactgtcagaactttgtatcattctaacaatagcctcatgtttattactctatttctagtgcgtggctagcatgtgtaacatgtaaaggaaacactacttatattcagctggatgaacacaaatctttgggttaaataaaggcattaggaattataggtggagaatcattgaacttttcaaagaaaattaatagtgttgtcttccaagcaagtttgatagtttgtttgagacctttatagaattcttttttagaatggaaactttttctagctggcctaatgtactatgggattctctaagacatattttccttcttaggatcatgatatactggtgtaccatctttaaagctttcaaattatttgttattataatagcatgcaaataatgaataattttaaagattgtgaataattaactttaaaaaacaaggtatatctttacgttttatttaaggtagaggtcaagctagcgcttcgagaatcatacataatcagccctaacagtatctctattgtagcccccttctgggttgctcataggtatcttacgtgtcataggaaggaagtgaacagttattggaggaaatagcactcttctgttagtgttgcaggtttagggagtggacagtaactcatactgttttttggtgttgttcctatttgagtttggaatcaaaggagcactagacatagtaggcagatcaaatttaaaaataaaaacgatcttcattactgatgaaagtcagattagagactatatcctttttcctgcaggaagacaaattagaagagagaaaaatcaatgggctgatctgcacataatttgctccctacaccctgactccccagattcacagtcagatgagttgttcctcatttgggatggcatgaatggggagatagcccttaaatgtcactttagagaaatccttccacaggaactagaggatgattatttttacatgtaacaatgacttctatcacctacagatattatcgtagtttaagcttagaattttagacaaccaaatattttaatgagccctgggatttcatttctacccttattcatttccatctttaaaattataatttataatctcatactacatcaagggatcaatgtaacaagtggtaagatgattcagttagctctgagaggaataaatgaagaaatataagatatagagacaggatgagaaaacagaagagaagatgacaggcaactgtttttataaggctcttaatattcttaatgcggtagtttccccttatccatggttttgttttctgcagtttgttactcatggtcaacaatgttccaaaaataggtgagtctacagtacaataagatgttttgagagagagagaaagaccatattcacataactattattggggtatattgttataattgttctattttattttcagttattgttgttaatctcttactctgcctaacataaattaaactttatcatagatatgtatgtataggaaaaagaacagtatatatacacacatatatatgtatgtatatatatgtgtatatgtgtatatatatacatatatgtatgtgtgtgtatatatatatagtttaatactatttgttgttttaggaatccactggagatcttggaatgtatctcctgtggataagaggggactactatattctttcctggaacaatagatcaaatatgtatagaaaaatcattcatgtgtttaataaaattttgttcagtgcttattccagaccagaaactgtatcagtcattagaaatacaaagatgaaaggaatagttctccttactgagtggggagacatataagtaaaccaaagtaacaatagaatatataaatgttgaagcagagtaaacttggggtgttaaggaagcacacggtggcttgggaggtgtaggaaatgtaaccatgcctgtggtggcaatgatgtgatggagaaccactgaaagtttcccagtaaagaaagaatataagctgaattagccagatactgtagttgaggaagcgtgatggtcatgaaataaattttgtattaaaagaaaataaggtatattcagcaatcatgggcagttccatgtagctttggtaagtggtacaatgggggagtgctacaaaccaggagggtatcagccaagatcacaaatcagtgctgagccaaggactgtaaatgtttctctgaaaatgcagaagtctgtagtaacagcaaattttcaaattcagtgttaaagatccgtaccccaaccaaggagagcaactaccttgagataagcactcttttaacctgagtattatttttttgttatggatcattaatggatatcctattcataccctttcaaatgcttttatatctttcacactataaattgccttatatgatattcctacacaaatgcatatttccatcccaattctatctgattctaatttcttattaagtagactgctcttgtataatacattctgatctattaggattatattccacttttcagatgctacaaacattcagcaagtactgtacttcttttaattgtcatcaggttataagtcttccaacttccagtttaagcttatgccagacaatcttttggaatattcagcactgaaatttatttttttcttttaggttttggcttttggcatgctaaattattttccatcgttgttctagccttcagtgatttttcaaattttgttaatgttttcaacaaccttattgtgggataagggtaactttaatctaatctagtaaatatttattgaaataacaatgagccacagctgcacgctctctagaaagtctgaatctcagccctaggggacttttccaaatatgatccttctttgggtgctctgccttagcactaaggatggtgactttcccctgtctcttctattcctatattctttagagttttctgtaccacttagaaagtaaaaccaggcgacctctggtacccatggtacaactgaaaacagccaccagagagagaactgtctcaccttcctcggctctatcagggtcatctctgataagacagtggccctcacctgagtcagtgcccaaggtgccccccacaacaccagcggaggcctcctccactgagcagtcggaccccagagtgctctgtaggagctgtagactgggaagaagggccgggtgtggtggctcatggctgtcatcccaacactttgggaagctgaggtgggcggattgcttgagcccaggggttcaagaccaacctaggcaaaatggtgcaaccctatctctacaaaaaatacaaaaattagccgggcgtggtggtgggcacctgtagtcccagctattctatttgggagactgaggcaggagaatcgcttgaacccgggaggcagaagttgcagtgagccgagattgtgccactgcactccagcctgggtgacaaagtcagaccctgtcttcaaaaaaaaaaaaaaaagaaaaaagactgggaatgcctaggtttacacgatgggttatcactccaaagatttgtgtcttttgtggccaatggcagatccaggaaagaaatgaaagttgccgatggggataggctgggggagagcaatacagatgtgtatgggaaaccccaacccatatatattgtaaatagatggactaggctaaacattgttgctgtttcagtcttctgcaaactcagcttttccacaataaagctctatctcctgtcggaaggaaggaaggaaggaaggaaggaaggaaggaaggaaggaagggagggagggagggagggagggagggagggagggatggatggggggaggggaaggggaaggggaagcacataaatatgctgggaccttcatattgctatagggcacccctgcttaatggaaccctcctcgcatctccaatgcaaacagccccatggcggagcaggcagcagccactctggtatttgtgtgtttcgcagtcctacagtgtgtttcctgtccttagagaacaaggatttccagccatgtgcctaatcacctccactccctatcttattttttaaaaacctctttgtagctgcttctctttgccctcacaatccttcatgcatagaagtcctgcttatctaaaacttctgttgtgtaaattcctcattgctgataacaaatgtctccaaaatttagcagcttaaaacaataaacatttataatttctgtaggtcagaaaataagaaaattttccattcaagatgttggccaggtgacagatttaccccttggtggtagtttactgacccttagtctggtgtgtttagtgtttaacaagcaaacaagttacatagaggaaacatagttacttttctgttttggagaaccgcaaggactttctcttagaccttctaacaaaaggacactatgaaaagcaaaagaagaactaaaacaaacatctaaacattctttattatgaatgatactttcttatactcaataataaaagcaatcaaccggtatttacattatttcaattttaaaaatatgaaatgtatccttaatcaaaagagtagattggtatagtttatgtaattaaataatatgataggaaagcagttagcaatgattcttcaccaacttgtgaaatgtaactttgttttttttttttcttttcatttcaggtattcaatacttcttagacacagacctgttaccatataccaaatattcctattacattgagaccaccaatgtgcatggttcaacaaggagtgtagctgtcacttacaagacaaaaccaggggtcccagagggaaacttgactttaagttatatcattcctattggctcagactctgtgacacttacctggacaacactctcaaatcaatctggtcccatagagaaatatattttgtcctgtgcccctttggctggtggtcagccatgtgtttcctacgaaggtcatgaaacctcagctaccatctggaatctggttccatttgccaagtacgatttttctgtacaggcgtgtactagcgggggctgtttacacagcttgcccattacagtgaccacagcccaggcccctccccaaagactaagtccacctaagatgcagaaaatcagttctacagaacttcatgtagaatggtctccaccagcggaactaaatggtaagaatccaaggctgagattcccctttttggtcaagacatgaatgagaatctattgtaattgtgcaattaggaatttggcagttgtattcctttttataactgcacaatataataattgagaaacagtttctaaagatataagatagtatttgtcctggttagtggaacaagtgtatttcttctaatctaataacaaattccattcaattaaattgccccttaaaaggctaatattatctttgctcttaatgacatctgccataacacaaatgatgtttataatttgaaactcacttatgaaatgcattatatttgactgtgtcacaagttagggcacccacaagcagtacatttttctcttctaagcaagaaaaagatataaaatgatacaaaaaatatgtatataagctaactgactccattaagttaatttttgcattcatgcatttgaacccttggttatataggccagacacacattcacagatttttaatcatttatatcatgtacatattatagcaaaatctttctttagatttgtaaagttatttggtaaaactgggtagagattgactataacatttatgcaaacagggcttatgttaaacaagttaaattaaaacctccaaatttgaaaggatacagactggagctataatgatcaaattccccaaaagaactggccattcttaacagaaattgtgaatatcaattctgaaaaagattgaatttacctatgataaagtgtagttattttttgtctatgtgttatccattttggtttgttttcctcatgagtatgcctttaatagtattttatacattcatctatatagcagtttgttgtcttctatgtacctgtcatctagattactaaactactaaatcactacattttgaatgctaaagaaattgacagtaatctaattagaaagacaatgaatatccagcactctttaactgacctgtccctaccctacccctaaagtaacccctttgtctgatgagttacgtaggttcactatttaatttctctaggaataattataagatatgaactatacatgagaagactgagatctactaaagaaaccacatctgaggaaagtcgagtttttcagagcagtggttggctcagtcctcattcatttgtagaatcggccaatgaaaatgcattaaaacctcctcaaacaatgacaaccatcactggcttggagccatacaccaagtatgagttcagagtcttagctgtgaatatggctggaagtgtgtcttctgcctgggtctcagaaagaacgggagaatcaggtaaagatcaatgttttaaattctacttttaaaacctctgaatgcaaatgtttcctcaaattaaagtcaaagtactgtgaaagtacattttgaaaagcaagaattagaaacttccatagaccaaggaaaattttcatatatatggatttgttacataaacaactcaaggtcataaagtacttgcagcaagttctagggggcaaaagtaaatgctttagttattaattcatggggcgaaaatggcttaactatagttatagtcttctgggaatgtttgtcaaaaatagcatttggtttccactcctgaagtggattggacacatgtctcatcttgctccatatacagcctaatttatgttcaatgaaagagataactgtcaccaattccacaaatttgtctttgtttttatttatctttccaaaataaatagtttagatactagattgtacataatgacagaatcgtggacatcaaaatctataattcacaagtgtgcttgtaagcagttggcatgatgataaggaaggaggacaacatatctaaattttctggattatcttcattaaggcaaaaatttttaatcctccactttattttttatattaaaacacttcaaatttcatgagcctttaagaaaaaaaatacacttttgttatgtgtttaatctgtagatatcaaagaaacccaaaccctgatctaaacttgacctgttaggaatatggaggatgagggtagctttaggttgatgtccaagggaatcatttcatgaataaaatacgcattgtgcttgagcatctcttaatgactaccagccatcttggacaaataatagagccatgatagcacaagtgatgaggcatggcattctggaaggggaaaatcaaggtcagaaatgaaaagtaatgggtgaaactgcaatactggtccctcgtaatcttatgggtcactagctaatgaaagtgcaatgagttcctttgataatacacctttggttagcacatttaaaatccctgtaaagagctcaggagtggcaggggggaaagggaaatgcatgtgtatgtaacctgaacatttcaagaaaaatttaacaaaaactttgagacattcattggggttatttagaatgctttaggtttacctctttctgaagaataatattcagccagctgcattggattggctcaatgacatatttccctacatgggaaatccagtacatcaccatgcatttttctgaactttttgaactgagatgttctatttttgtgacgttttttagatactcgtaagacttataatttcctatctatccactttcctatctttatgaacatgagcaaattcctatgagatttttattttgcaagtagaaagtagctggtaatatgaagatggagaatatactttcagataacattttaaaaagtgaataccttttacatataccagcatattcttggactttttcaaagcagaatattttaaaaggtaaaggtatttcagaaactaaatgaatgtgtgaattaaatttaaaaatatatagggacgacattcattgttttgatgttattgttattgttctcattgatagcacctgtattcatgatccctccttcagtctttcccctctcttcgtactctctcaatatctcctgggagaagccagcagataatgttacaagaggaaaagttgtggggtatgacatcaatatgctttctgaacaatcacctcaacagtctattcccatggcgttttcacaggtattgttatttttaactaatgtcctttcagaattggcttagggcttcatttggacattttttgagtttgcagaattctgtgacagaattctccctctatattgattaaacagggcattttttcttaatataatattatgtgtacaagcctccctctttgtatgtcacttgtatttttccagtataatcatatattgaaactaagttggtataatttatttcataagacttgttttttttccatttatcatgtatccttaaatattttacatgaagttgactttcattaactgtgtactatcatgttatttggacacacaataattatttaaccagtccacactcagttgatattgtattgtattaattcttttggaaatataaataacattgataaaacttcttatatgtacatttcatatacatttctacttcaaaaatctgaagaattgaatttatcacagcttataacaaaatgaattatgaatatgttcaaagttttgaatatacagtcatatattgccttctagtaattcatcccccagctagcagtagtgagaataattatcatagctaaaagttactgaggctttactgtgtacgtgaactaattcatctgatacatacagcaatcctagaggataggaggctcttgttctctccagtttacagttgtggctgatatacctctctgcccattttaccagcatccaggtggccaatagcagaagctgatggaaggatgtcaaccgaacaagttcttctgtgtatttggctgttcagtgcctcctctgagagagatgctcttctctgggcattagcataagataaaaagatctttacactttatacctactcccatagatctagccacatttttctttccatgaattcctagttcctgatccttccatctttttttttcatgcccttggccaatatttccaagccactgccatattgtccaggtacattttaccttgagacacgtctctttccacacaacatgggtgaccaggtgaactgcctgaagttctgcccactaagaggatttcttcgctctgctgtttcacagggtcatctctgacaagggttttagagcaacagctaccatttagacttgcagccacataccaagacatcctatctgtaaactaaattctgctttttttccacattctttcagctcttaagggacctcccatgggtcataggtatgagctgaggttgagccaccagtataagaatggtggatgtcatgggggcctgaaccacctgcttgcacaatgtattacggcttttggctctgcttatacccaatctcagacatccacttccattttatgatgaatttctgttgggcccttctaacctcaagacttggctgagacaattccaagattataaaaaagtagctctagctgcatggctatttggtgttccatgaccagatgttctgtttttactgaagcctgaaagcatgctagggccatttagcaaatggtatatagtttccattacatgttatgcctttgttccaagctcttggggtctatctgccctgtgattctctttctatgtgtgccttgcaacattttttcccacaatgcttacctctagtgctgtaaaaattactacatgttatgtcccaagtggctcatctgcctgtaccacaggctggacctggtgcagagccctttccgcctctgggatacactcaaaactggcagcattccatattactcagtaaatttctcagaacagtattctcaaatgtggaatatgctcccttcagaatgtgaagaggtcaactagacattttgtttccttcttagtggtggtagaagcaaggtgcaataatttgtcctttattttggaggggatatcctagcatgtctcaggccacttgaactcctaaaaacttcactgatatggtagattccttaatcttcataatattgctgtctcactttctagaacacatatgtcttacctctgcatacctaccatttcttgtttgtctgattcatttaatatgatgctatcgatataaagaatactgtcaaggtggcatttatagtttgtcttaaattggtgattaatcaccctcagatttcctttgtctttcttcagtgcattgatggcgaccagcaagatccatgcattgtccttataattactagtttccccagagtagtccttgtaattactaattccaccaaaccagtgaattaccttctactggtaactcatcgcagttcaccactaatggaagtttaagcattgcaccactagggcatgctgtggactgttagtactctacctgctgtctatgatgagatcattgtaaaccagcaagtggatgatggagctccaaaatatcattttagagtctccttcctagggccagtcctgttacgactatcttagggcaaattcccccggaagcagactcttggtagaggactgagtacaggaggtttattgggggaactctttcagaaacaacaaatgtgaagtgataaagtatgtaggattgagcagcaaagaagctgaactgtgatgcaatagtggaagcagcctcagcggattccgtgggtagttctggagctgaaatgaccctcttagcttatctcaaattaagctaggaagtcagacctttgtaccctagagtatttgtgtcctcgggctggtgtaacaaattaacataaactgagtgtcttaaaacaacggaaatttaggtgttagtacagccaggtcccccacaggctctaggagacaattcttctcttctacctacctgtggctcctggtgttccttggcttgtggcaacataactctaatatctgctgcctctgtcttcacaagtcctactctgtgtctctgtctcctctgggtctgtgtgtccgtctcatttctcccataaaaataccagtcattggattttaagctaacctgaaatccaggatgacaactaattaattacatctgcaaagaccttatttccaaacaaggtcttattctgaatttttgggagacactatacaatccactactaataggtttgccatttttttctaagcctttttaggagaccagaacccatgtacaacacacaattttattttctatactgatgaaaaagaagagccaataaataatttatgattacttatttttcattaatctgtctacgtgttcactcatttgcaattatctcatgatgaatacacaactggcataatatatatattttgacttaaacaggttagtctaccgatctggtataccatgggatttaaggtaaagttagttgtaactttcatgtggtctttgccatgttgtatctcatttatactcaatgttttattttgttgtttttactattctctggctttataaactattctttctttgtaaaacacagttttgatttatctattacttatattatagtagttgttgttctaagaaaaaaataaggtgagaaatattatttataaaatacagccttagaagtcaacctgtttgttcatattccacatctcccaattattagctgtatcacacgtctctctgcttctggttttattcatctgtgaaatgggaaaaccatttttgctcacctacctgcttaaagagcctgataaatattgacacattattattagtgattattattaatggtgtggaactacattatactttataaactagctatcatttaatggggcaggaaaataaatatttttattattgttgttgttatttaaaaggctgttccttatggctgaactggaataaggacatagatatatcaccttattctcttttttatttttatttctttgagacagagtctcgctctgtcacccaggcttgagtgcagtggcgcaatctcagttcactgcaatcttctcttcctgggttcaagcaattcttgtgcttcagccttccaagtagctgggactacaggtgtgtgccactacacctgactaattttttttttaatttttatttttagtagagacagggttttgccatctttgccaggttggtcttgaacccctagcctcaagtgatccacccgcctcggtctcccaaaatactgggattacaggcatgagccactgcactgggcctaccttattctcttttgaactctctctcctgtgcaaatattctctgttcaaggaaatgaaatcaaaagtagcagaacaaagtccaattttttaccttctcaatgattaaatttgtatctgaactgacctgagtatgtcttgttataatctttgtaaataaatagccaaaattcccagggaaaatctactataaaaataactagtaagaaacctttgcctaagaatgagacaggggggatacgtaaaagtggtgatgatgtaggattcattgtgggggatcaagctgctgtagaatttttcctacccctttgaagacttatttcatgaaaaactttcaattagatagattttataagacttataaattgactctatgtacatgataaagacaaagtctatccaagtgataattttatgctgcaagttctggggccaataatgtatttttaaaataatgtaatttataataatcatctgtaaagaaggaaaagccttttcaaaataaatattagtgtagatttcttctttcttattttatttcatcgtgggttcttgctacaaagaatattttgcttaaaaaatagttgtacttcctaaattaaataagaaatagcttcatgtactttatcctaaaaacaataccattttctaaaaatttacattgaaatctaccaggattattctaaaagggatgaatattacagcaatattcataagtttaactcagttcaaggtttattttacttagaaaattttaaatcacatttcacagaaaagtttgtatcttcattatatcaataatgattttaaaattagaaaaataaagaattacttggtatttgatgtttttcttatttcaaaatgtaattgcaaggaaatggttttaaagttttaaatttaaattattcctagagttttagaatctttaaaaacacctttatttctgaatgttattgaaacactgtattctacattccaatctcactgctttttagaacaactcatgtaacttacgaaattttaaagtcaacacctaggcaaatattccaaatgaattttattttacccctaaagagaaagtctctagaaaactactccaaatgttactgaactttacatttatctgtatttatatttatggaagattattttatatgactatgtatcagtagccctaagaaaattagttttgtactcatagttactgtcatactctctgttttaatgacttttattttctgaatataatttctagtggcctttgtacctacaacctaaacaaatttacatggttgcttttgatcacttcaaattataatgacagaaccaactctcaatgttaattgtttaataatttatttatggactgtgagtttcctgtcagtcttctttgctcaaatctgctattttcatttgaaattatatgataaagataatatttcaaataacgtaactgtttgatctaatctttatatgtttgtttatataagaaagatgattgagaattgacttaacgtggatgctcagtaatatgcttaatgtttaattttttcccctttttcttctgtgactttttttcataaagaaaatgatagtatcgatttaacatagcaacggcatttctttctgtcctagcaccatcaaatagcttgggtattactgctctgggttacttttggccaagccccatggctttgtttggactttatcatgataacaatgacaatgtcaccgtctttatctctaccattggtgacaataaccataccaccatgctgctttatgaggcaataacttggttttctcatttatccactcaggaactggattattacctcataaaacagtgtgattgtacaataatcaattaaatcctggcttgtcgagactcttcagaaaaaaaaaaaaaaacccttttcctaatggtggttggcaataattccctctgtctgaattcatggaactttgactgccaaggttatattttcacactgattacctattatctttctttctttctttctttcttttttgccttgaagctgttgcacactgctaaatcccaagaactatcttacactgtagaaggactgaaaccttataggatatatgagtttactattactctctgcaattcagttggttgtgtgaccagtgcttcgggagcaggacaaactttagcagcaggtaagcaagttttaatggatatgaaaaatctgttgcctatcaagaaaaaaaacttataatattcaacaccttctctacttgagactttatatttgtcttctcctccctcactaactctgattgcttcttacctcaacagttttaaacaacaacaaccaaaacgtaacttaaagaggtacctaggagctacgagttacagctgtgtcataataagaaatataattagtggtagagtgactccactctacaactagaaatatatagaatatacaactagaaacatatacaaatatatagaactagaaatacatagaaatgtaattagttgtagcgtgactccagggcttaactaccaacctgtgtcctagcagtgtcctgacaattgtgagaaacaatcaggaagcttcttatgaggacgttaggatacctcttccctcagtccagacattttttgtaggcttggctctactcactcctgatccatgggaacatctagaaattactgtgtggcctggtgttatatttggctttcatgaaataggtaaatgtttatctattgttttattaagaagaagcttttaagttaataaaatttaaataaaagaattgttattaagtataatctgagtagaaatggtttgtataatttgtgcttgcttcattcaggactaactggattcatacaaacctgattacatgtattagtaagacttataaaacccaattatttagcattaatatattttcaaatcagtgtttttctgattctagataaaagcttagtttcctggttatctttaaagaaatgtccatgtgtaaggaggttaagacactctagatgaattacagatattacgaaaattcatgtttacctgtaaaaacatttcctagacctcctccccaaatcccttcatcctattattaataggtccaattatgtagggttttttttctggttctggaaaaaattgcttagctcaaatgatctcatccaagtaatttatttttttcaaaattttcattaatgcaaacaactctgaaattctaagaaattatggtttactaaatttataactgaacactttgtatttttatgtattttatagatgtgcatttcagatgcatgaatacattgatggagtacctagcttgtacaaaacactcttctcctataaaactatctgtttttgtatactgtattattaaaggtttactgaatgctgaatatggacagcagaggaggactctatctcctttaaatgatacaatttcagactagaagacaaaaattaaaataagaatcagtcttacaagttggagaaagtaaaaatggagacaacggagggtgaagactgggtgtgttatagtaggggacatagggatcccaagcacgtggccatgcaaaactggaatcacatcctctcagggttgcaaaacatgtaaaaataatctagtgttactatatagccagtatcaatatattctttgtaatattcccccaagtgttcatctaacccatgtctgataccttcagtgttacagaaactactacgtctcagacaaagctataccatctttagatacctcttttagaatgtgatttcttagattggtcaaaaatatctcctagtaacttctactcaacattcttattctacttccttgggggctgtcgttaacctaatttatcatccttccaataacattttcaataacattatatccacccaagtcttttctcctttaggctgcatatcatggtggttcccatctgaacctcatatgcaatagtgtctagagctgttattagtataattcttgtagatgagatctagtctgccttttcatagatataagcaaactaaagaacctgaagagagacatgcccgtccctagaaactagctggatcatggagatgggaatagaagagcaggaaacatgtctacagaatagaatctgcctgccctatgcattagtggtaacatctgtgctaatagtatcctcattggttgcagtggcaaaatcctgttgcgtaaaagatgatgtacctgggtgctctgtgcagctctcattttagttactggtgaggcgattaaaacgactcctgtccactggcaggattgtgaagtaaaactaactagtcagagccctctgaatcctctctctattttttttatccttgaaaaatagaactggaaacttatattcgctaaaagtcatgtgacgtgaaagttagttgacttacaaaaataagagtttattcatatatgtgaggggaaaaaaatggttagccaaaatgccagggtttcaatccgggctctgccattgactagctgtgtgaccttatataaattatctaacctctgtgccttagttttccaatttataaataagcataacttatttgtagggttctgatgaggattagaattagttaatacatgtaaaatatttaaagcagtgcccatcacagttcattctcaataaaaatttattgtcatgatttttatcataatattatagaagacttttgttagtcacagtataaatgttatggaatttctaatgttatcaaaatcaaggagagtttattttacaactttgattttctaacattattataaaatataaaatggagagttctaaaactaaggattgtattgtgaaaataaaacttagaaaggcttaaaatctgaaagcattatttattatttctgtaagaagtatgtcattcagaattattatgcacatttcaaaactttgctcaaaaacagcaaatttcacatttgttggttgcaatatagagttaataatgtgccataaatgtattattactacattttattgtgaatgctcaattcagaaccatctcttgagggcttactatttaaagcactgtggaggattctaagataattatactcagcatttgggttaaggagttgagatccaacaggtaggattaacaccatggcgacatgtgctaagggctgtgagaaaggtgaaaaaaatgctatgggaaggtagaaaatgagataaatgattttgatttgggagactgagtagatacctcattaaatgctatttcagataaactataaaagaatggtaaagactttcgcagatatttactgagcacatacaatgtgctagtttctgttttaggggctggcactgttccaagtactgatgtaatgaaagcagagatttatgaagacttccctggtggtagagtacacaatagattagaagagggagtgtaataagtgtctggtagacttttttaaaaaggcaataagagagtaaatcagacgagtagaagtgaagattgaaagaagggaatggagtgacttcaaggaagacagacctggaagttaagcagtgggaaggatggacaatgatagcaaatattgcagcccatggtggtgccattaaataaaaggggaaagatgaacaaagaacagatgggagaaataaactcgtgagtttatttgatcatttgatagaaacacatccatgccaattataaccatccaggagcagaaattgcaaatctggggcttaaaaatgatgcagattttgtattcatctgcatatagatgggagctaatgctataggttataatcaattagtgaaagcagagaaaatgcaaaatggaagcccaaagaaaacaccttagtgaatattctatctgggaagaaagaagaaaggaagagtgaagtgaacagaggtatggtcagaattaggaaaagaactgagaggaagcagtatcagaaaagtcaagggaagagagaattctagaaggagaatattgtctgcagtgtcatatggtatagggaaagcaagagaaatgtgacctaaaatggatgcgaggtcactggtgactctctggggattaccctaattagcatggttgaagcagaagctggaacatgaaggattgagcagcggcaggaggagatatagtggtaaatttcaaatgtgtttttttttttttattctttgctaaaatttttcttctacccaattttcattcttcaaaaaattgtattaccttttgtttccatataaaatcctttcttttctaaagaaaaatttattttagtgtttgtttttttctggaaaaaatgtttattttctaattccttaatatattttgttagaactatctgattcttcacctgcccagcagaaaaagaaagtctcttatatgacaaaagtatggaaaaataatttttacttacagttgggtttattataaaatacatcatttttagggttgttcagatcagtgaaaataaacttatttgcttttatttgaataccaggaaaaaattataaatccatcattctttttgcctccttccttattcagtagatgaatgtgtatttctaaatgtttttccaaaacaaaacatctgaatagaaagtatagacattaaatcatagaaatacactgcagacctataataaagccagttctttagaatggtcaacaattttgctataggagagtaataaaagttgacttgcaactttactgttcatcctgctctgttttttctactattaacattgcaatttggagagtatatattattccaatgaactccaatggatttgtgggaaatttaactcttatgtctaatagctcatatgagctcattatcagacatcaatggaaacgagtgaccattcaaaaattttgaaaaagagcaccacaaattagaagtagtaattagccttttggaagcatttgaatcatgaaaagatatgttgcccccttaaatctcggtctcaaaaatcagaaagatacttgtgaagatttatcttgctgtttcattaaaaagcttgagaattataattggctctctcttgttttaaacattttttcaattaaatatatgattagaatgggtacatttcatccagagtattgcactgctgcttctttagtttcaatgcctgtgacaaagtctgagaactgatttgagagaggtgttctctcaggagcagctgcatctctctccattgcaaaatcttcaagcagtgttattaatggctttggagttgcttctgggtgtatgaaggtaatgagttgatgaactgggccctcttaaaatccttgttacacttttctttaagattctccttttaatccgagaaatttgtgcatttccacccattgcaaattgagtttagtttaaacccttcttatgagaaattacttttggagatccattcctgaagggacaatgtgatatttcccttgcctgtcataaattgacctccatactacaagcttagaagtgcccatctcgcataaaacaagtaattggtgtgcattaaattttctttctgaatgcaaagtaaaatgtataggctgtttgctgctgggttgaaaacacacattgttttgcattcgggtacataagtcttttccttgtgaataggagccagagtgattaaacaagcactcttaatatgttaatttataattttaattacaacaatcttgtatatatagtcattagtgaatactaatataaatatttttctacctttttattcataatgcataaaccaatcacccagttacttctctgaggttgcctgtttttgtttcataatacaatctttgttcttagttatgaatgcattttgttcattcctgtcttcaataatccctcattaagctagtcactttctgctccatgctaaaaaggaaaaattatcatgcaaatgtggcatgccatattaaaaagcacattaccaaacacttttgttgctgtccttcaattagtttcccttctttgaatttaattccatttgttgttaaactactgacttgatgtatggactcatgaatctgaggctgctgccaagaaagtggggaaaaaaaatcaaagcctcttcgaagagctgcagaggcgagctgaaatgaatttgcttcacctttgacaagaacacttgaacagcattggaatcctctgatgattcaacttggctaattatccaattatttatttcaagaataaaggcaccattttacaattaaggaagtgtaaagtagtctgagaaatttggtaatgacagatgacttaagtaacttctaagataaacagtatctgtgcaaaacttgtcccaccaattgttttcaggcagcagttggtgtgtcttagcatcagtgaaatcctgagtacactgaaggttttttgtttgtttgttttgctctttcaacagaaattattttacacttgtaaccaacatgtcaaatttccatggctcttaagcaatgtttaagttatatttctcttgattaaaagctttcggttcaaagcaatactttttaattgcctaatgatataagtcagttcttaggaaagaaccgcacatttaggagttcatttgcaatataactgaaaaattcattgcatggcagtaaaacaatttactgttaattacaaggagaagaatttgctgtagcatgctcgcagattgccatgaatcatgcagcactcctagagatttataacagatgtgtaaatgggatgaattagcagggtttaataacagagacacaaatcatgcagacttcaaggagctttaattgatatactagaatgtgacgggcatgaatcactcagccattcaacagcactgtaacatatggtcagctcaatatgccgcatcttaaatcggttggtgagtcgtaggttgtcccatatggtggaagcaatacatttttcatgattaaaaaaaagaatccattttttaaagaaatatgattgcaaagcatgttattgaacagtcttctgaatgccaaactgctttttttaaatgcttttttttttctttaacatggcagcttctcaaaataaataggggctactccttgtaataccagatcgctggaggcattataagaaccaaatcggtgcttgttggcacactcgatccacagcaagcctatagaaaagcgcagctgatgattgctgtgattgtcagggaaatccttcaggctggggcaaaacaaacaaatgaaaggatgatgtcactttcagagaagttcaggaatgcccagctttgtaaattgaagaaaatgagttggatgagagatccctgcttagcagggtaagaaagtggctgtgataaataataccatgacccctaaggtaacaattggatgtaacattttatactaacttcttaattaaatgctcagtcctacaggggcatgtgaaaagaagcactggctggtcatcacatagatggtagcaccaattccaagtcattcttgaagaattatttcagtatctgcaaacaggtaccctggttgaagactggtaactggtagtgtgcaaacatgtttttattggaactgggatctggcagcttttggaaaagcttttgctgcattagtaaatctgacagacttgaaaaaggaatattgcagccttagaactgtggctgccagaatttaatgtcaacaattaaaatttattttgatccttacctagtgtttattactgtttgtatacacaacagaccttactaatacagagatgcactattagatggaattaccatctgttcagagtgaaatgctggcatctgtcttagatgctaaaactaaaatgatattatttctaacaaaacaaaattaactgctttttactcaccaactttaatttgtagtgtgtagttgtatccaaggaaaaggcttgattttgaactatgtgatgacctctgtggccaggtctatatttagatatgcgactttatcaggggctctactggcctttttggcatatgaaaatggcatgtagaaatcacactttcaatacacaattatagcttcataatatactatgtatcctataagtcattaaaacaacacaaccaagctatgtaaaaattgactgaatcagagagactctactatgcaaaatattttgacagatacgccctaaaaaactgcaaggaaagaaattaaataggcaaaaaatcatctgaacaaagttgctataggtcccacagtgacatctttaggaaaatacaaactgtatctttcttctctgttagactattttaaattttctcccacatggacatatataaaaaatttacattcagtgccccctccttttaatttaaagcctaagtatcctattaaaataggtctttagcttttggaagttagagaatttggaggatcaaggacaatggtagtttccatactgatgttagatcagtgacgctactttctgagaagccagacttctattctatatatcacaaaataataaattgtgtcacaccagcatttaatgcatgtacacagtgcattaactgtaactgtagtacatttatttgtgctgcaggagacttgaaaatgatgaagaaatcgatactttgctgtcagagaagcaagtgttacgatgcatttaagtagttaattgcataagccccataaaagcttcaagtttgggtagcaaggatgccataattacagtctgagcaactaccttttattagtggtggactttagggaatggtggttgctgtcatcattgctgctatatgtgcagtttagaaataatggatcctcttctctcttcatgtgtaggatggtagttttgtgcaaattattgtgatcgccagaacaataactggttaaggtagtgtttgttcaccatgttcactgaacttctctaaaagcagggttttctttatgtcacagaacacatagacaaatcatatttgtatgccatgctaaggtaaaggaacaaggtggctgagagctgaaggggataaaccagaggggctcctgctggcttcccaggagcaaaggggatcaggatgtctggtacccattcgtggcttatgaacttagaagtactgttttaaattattcaaccaaagaattttgaaactggaagaggtcctagacataatcaagcctgtcactctaacaattgaagtaaccgaagaatagagagacctaataatggattaaccaatgttccataatcagggtcttaaagagccaatctagagcctacattttctcctttccagatcttctagtaatatcctctcctgaaggtgacttgtcaacaaagaagaaagtggcaaaatatattttattctttcttccctggtcagataatagacagtcaacaagatgatgctgagtcacccctgagagtttcgggggaaaacttttcctctttaagacactgattggtgagcagctgattctgcagcagtctctctgcaacagagaaatcagggctcatgacctggacttcttgtttgcgtcctggtccagtgcccttttgcaagtgttctggcctagcagtgtttggcaaattgtatttcctggcatagttttgcatttctgcgaaaaagtcaaaatcatattctattgacagggtgcttattaagaatgtcttatgtagtctgctccccacccacccctgaaacatagaaaaattgtttattcttaaattcttgtcatcatcatagaaagctgatgatgctttaagatattgacacagccatacagtcttcataggcaaaaaatgaacagattccttaaaaacaaatgaacagattccattttaaagaccagtacctcagaagagctttgttcagcttttagttcttatcctatggtgctcaaaatgctacactacataaattttgcaagtctaaatgtattcatttggatatactactaattatgttataaagtaataaatgctgcataaagaatgcatattataacattttataaaaatatctatacatcgaatagatagacaagaaattagattacccctattaaaaaatacaagtgctattttaaaagtacaagaattttgtacttttattcaaatagacattttattcttagaaatgatggataatgaacattcattttaaactttgtatattatccttagaaataatgaatattgaagattcgttttaaactttacatttacaagaattttctgggtaaatacagatagattttgaatatagatgaattgtattccttaatcatacataatttgaaagatttgttcttgtaatgatagcaccttatatttgtatagaaacttgttttctaaaacataaagcaaatatgtatattgttgtagaagcaattgttgtcaatgtatgtcactgaaaatgtatcctcatgttgcagatgggaaagtgggagcagatataaagggatttttctaagatcacacagatttagacattaaaaagtgaaatataatttttaaaagtctaccaaatccctttcattattcagtgttgtctcttaacgaactgttttgtaaattaacaaatctttaaaagtcatatctacttttacctatagttccttttccttgaaaatctgacgaataattcatcattaccccaatctcttggtgattctatgtgcatgtatgtgtgtgtgtttaatggttcagaagtatctatttttcttcttattctacttgtgtgtatgtgagaccagtctagtttaattgattgacaatttcacttaattcccccttccagccttagaagaactctgaaaagaataactcagtaggatgttcaccctttcaaacaggcttagttgactcctccatgtgaaactgtaaaacacacctactggaatgttttttgttttgtttttcttttaagcaagagaataaaaaatgtactctagttctattcattctcaggaattgacttctaaaggacagtcccattgctagatggaataattcctctgggaatcaagaagtgctctactacttaaagtttaaatggtaaacattaactttaatggactctcaagaatttccctattgattagaatcactttgccaaattaaaaaaaaagtgtgctctaattttcaataattattacacaaaaacgacagagttgccagaattccttttgtttagttttgtttcctattactcttaatctatattcctgtttaagacgtaatttttggattatgctactgatgggggaaggaatttgatttctgtggtggtgctgagcttcaacattatctccattgagttgagtggttggagtaaagtagagatgtatcaactttcaaacaaatgggacctggagaaaggctgctttcaaacagcaatgaaattcttcagcttttaagaagcataggaggcatattcatacttcttctcaacatttagttaaaatggaaatcctatcctcaacacaccaaatatgtataatttgtgatgctctgtctacatctttggtgtccagtatggtagtcatgaatcatatgtggctatttaaattcaaaatacagttaattaaaattaagaaatttgacattcagtttctcattctcactagctacatttcaagtgctcaatagtcttattataaggctagtggttaccgtattaaacattacagtcctagaacatttccttcattggagaaagttctattggacagtactggtaaagtagtttttggctattggatattactaggttagtagtttatgaaactaaaaagttcaggtttctgtgtcccaaaaccctagggaatctagcaaatttcaatttaaacattatgtaattggttctccattgcttccctgagcccaggactaaaaaatctttggcagctttcctttcctagttgagattatagccaagaatggcctgctaaaatcttaatacaaatatgtaactctaaactctgaagagagactctgggtgaagaaatttctgaatggcttagccttttattttgttttggattattttgaagtgagatcataacttgtagaatgaaatctttgagaacctaccatttaactgatttttagcagaaaaaaatgctaagagaaattatgcatataattcacagattcatacatatataaaaataaaatatcacatgggctgcagtggcagaaaataaccagaattgttaattatccttctaacttgatgaactttttgctcagtgccttttcttttttactaaaagttaaaatagaaccaaaatgaattgtttctttttgaaaagctggccgaaggtctaaaaagtaacaaatactaattgttctaagctgctttacggtgaatttcctttcatggtttaagggcttcaattcttatatccacatcattttgatttatatttattgaaacaggcaatgactttgcgtctgtgtatggctgtgttaacacaggtgtaaattgaaagtccacagatgtagtttgggcccttaataaataggctcggtgattatgacatttgttcctttctccacattcacctctcaaatccagcagacatacttaaagggggaataaatctcagctcacaaactcaactgtttaagggaaaaaaaaatcaaaccaaaacaaaccttcattttcaataaatcagctgttaatctgaatgagcaagttgtagggaaaaccttaatctccgtgactcctagggtttcccaggaaccttcaaagaattgccagtgtcccaccacctgaaaggatggcaaggtcccagtgtatgcaagggcatgaggtcactactgctccaaggctaagcccactgctggtggtggggtcacttcagggccagggtgctctctaggaccaagaggctgaccaaagttagttgcctggaccgttgtgtgtaaactgctgaactcacaggcttgttattttgtgctgatgctctgtttaacattcagagtgctattgcttgtttgctttcatttagatcagtttttaagctttaaaaatagaaaatagcgtataaaaggagcttttttgaccaaagaagatatacagatggcaaatacacatatgaaaaatgttctatatcatatgtcataaagggaaatgcaaattaaaataagataccactacacacccattagaatggccaaaatctggaacactgacaacaccaaatgctgatgaggctgtacagtagaaggaatgctcattcattgccagtgggaatgcaaaatggtacagccactttggaagacagtttggcagtgtcttgaaaaccaaacatgctcttaccatatgatacagcaattgcacttcttggtatttactcaacggagttaaaaacacaaaaccctgatatataattagatgtacacatatatatgcacatcatagcagctttattcacaattgccaaaacttggaaacaaccaggatatttcatcagtagatgaatgaataaataaactgtgataaactatgctacatccagacaagggaatattatttagcattaaatgagctagcaaatgatgaaaagacatgaaggaaacttaaatgcatattactcagtgaaaggtcagtctacaaaggctacatgctttatgattccaactatatgactttctggaaaaggcaaaactacggagatgagtagttacctggggttggggggaaggagagatgaataggcagggcacagaggatgttttgggtagggaaaattttctgtgtaatagcataatgatggatgcatgccatcatacatttgtccaaacccagagaaggtaaacaccacgtgtgagccccaatggaaactatgtactttgaatgaaaatgatgtgtcaatgcagatttatctactgtagcaaatgaaccatttgggtgccggatgttgatattggaagagactgtgcatgggtggggagatatggtagaactctgtaccttcttctcaatttttctatgaacataaaacttctcttaaaaattaagtctactgggcgtagtggcacctgtctgtagtcccagctacttgggaggctgagacaggaagattgcttgagcccaggagttccaggctgtagtgagctatcattatgcctgtgcatagccactgcactccagcctgggcaacaatgtgagactccatctctaaaaaaaaaaataaataaaggttacccctggcacattgcctatggtgtagccgtgctccacaggagcaatcaaaaacaaaaataatgaaagtctttttaaaaatgactttctgatgtatttttacacaagcacaaagttttggcaaactcgtgttaatattccttcattacccattggttggcacggattatgctttgcctgtgtaaattacagcacggagttgatgcctctttaaggcaaggggctctgccctatgggtttagtgctagtcattggctgtaggtttcactgcgggatcctgtggctcctgggtgaggcagctcttactcagccaagggaagttctacgcagaagggggcagccatgagccatcagaaaccaacgggcacagaaactgggccattggggtacctgcttggtagagggactgtggttggggcaccacccagagtacagcagctactataatatataagatctattatttagctaaaaagaatagagaagttattttcaagaaaaaatttaatttgaaagttttgtgtgtagtatattggccatttaaattttgtttcactgcatttaagataaactctatattgtgttttcagttcctagagccatacagatacttgaaaccacaactgatttgatttgaagtgtgatatatacaaatacatatatacgtatatgtgaatatgtgtgtctagagacagaaaccaaattcttgaatataacaggtgttttctaatatttagcaccagcacaactgaggccacctctggttaaaggaatcaacagcacaacaatccatcttaagtggtttccacctgaagaactgaatggaccctctcctatatatcagctggaaaggagagagtcatctctaccagctctgatgaccacgatgatgaaaggaatccgtttcataggaaatgggtattgtaaatttcccagctccactcacccagtcaatacagacttcactggtaagtgtgtttgacattgctttatttaggagacacgaagctccaaaatgttttctatattttcatatccctttacaatgaatttttattatacctacttagagaaatactaattcagccctttgatagcttttgcctgattgtttcagcatgtccatctttttagaattctggggaaaaaagtcaggtaagtgaaggaaaggaaaaataaaagatgaagatgaagaagcagccttattggatcaaagtatgtgctttgtatttgtctttttgtgaagtatgtgccaggacatgtttcttgaaatattattcactgtgttctctgagcaaatgagtttgcaaaatgccctcatgctattggagattctcagtatgcaccccgttactgaaactccaaaaagcattgtaagaaagctattcaactttgcttagctaatcatgcctaacagatatttgatgtaatgttttctttttctttctcttgctgtttccttcttctttttttcactgtgacaacttaatatctcatgttctatgaagaacattgtggggaaaactaatcccagggaaaagataacttctctaagccaggactatggtaaagcaagtgaggctcttgtttcggtcacaaaatttaaaggcactaaaaaactcagtgttaatgtaaattttaatgcaatatttttaaaaatgaaaatcaatgtgaaagcactataaaaatattatcaaaagcttaaataaagacagattgaactctgtaccagcacaatcctgcctcactggccttaccctcctcctggccttactagtaccgcaatattttggaagtcccatgacctctgtgacttacagcttctaatagcatgatttcaatatagctgtaaaaaaactctacttatggtacaccatttttccaatttttaaaaaaatttacaaagtataagatatatattattatgtaaactcataaagatgttcatttaatcatccatgagaaagtcattttggagcaaatagctagtctttaaaatattgcatatgtgaagacaatgaaatggaattcgagctataaaaatttgtattgttttatttttacttaaaatagtaaatagtttgcttttcattgagactggctgctgatgcaccttggtaatgaatcatgattatattctaactgagatatattgagattaatgcatgattaactactctctcagtacatcaaaatcattgcagagtattagaaattgaaccattgagctaaaaatgctcaacttctgctttatattcttaaaatggcaaaaaagaaaagaaaaaaaaggtaaggaaaaggaatacatgaataatagtaaaactcttttctcaaatgaaaatggaaactacctccctgatccaatatttggcttgagatgtgtttcttccaagaaatagcatccgtttccattcagctgggcatagctgctgcaaggatgtcagcttggatttgcaggctagccagcagacagatttttgatgggatcacctactgttgttgcagtgaaagatagaatggcccgtccaccgttaataaatttggtcatcctcgctatctcccttgctggccttatactctgaggtgcaagggctaggggcagatgcagtgtctgggaagttttccaaattcctctttaaaaaagttaggctgtaaacactggcctcactaagcaggatccttctgtctataacaaagcctccagctgcacagaaaatatgcttggagtacacaccatttgaaggacaaggcagggagatcacaattttggcttgaactactccctggagctttggtgattcctggagaatgagaagttcttctgtgttcaggcatgttctgggacattgctgatgccctttttagtggtagcttggctttacttttaagacccctttaacttttaatataaccatgtatatactaagttattggtttgatcctttggctgacttgccaggtttggctgaatgattttattgagttgtaccgaagcctaactaaatgtacccaattaatgagctaggacaggttttcaaaaccaactcaataactttctgtaaacttgcatctttcctaaatagagaggtaagcatataattagcatcttacattattcttactgatatattatcctatttaatccctctgcaaccctataaagtagctctttttaccctcgtagtacaggaggaaaagaggctccagtgagtgacttgcccattgtgccacagctattgaatttcagggtggaaacgtgaattggagccttccaaatttaaaggcaaggtctctgctacagggtggaaaggaacttttgtagactgttctttggaagtgatagaataggaagtatacaaaagtaagaaagagggataggaggtgaaataattatcacccaaatattccttatctgacactgctaaactttttggatttgtctttcagttagtttcagctcacaaacagcaagtagtgttggcattatttattcatttatttgtatccccaaagacatgtaggcatcaggtttttttttaatagcaattaaacccagagtgttactagaagctagatgtttaaaatataaataacattatgtgaaatgggctgaagtgttatgcgttaaaacagtgctttcaactcacattcctttatatttcattcagtttttatattctgaggcaaatttaatgagcaaatccttgaaacctctaatatgatgaattacattttaaaagttaataactttaagataaactaagatgtcctttgttttgaattattcaattcaaaatctcaaacttcaactaaaatgacttctgaatagaaatatcaattagtactcaaatacaaatataaggttgatgtacataattatacatattttatatatgaaaagataagttagattgtacccatcaatgacaggaattataaacgcattcataacacatttcatggccatgaacattatgttgcaagtctcagtaagaaatatctcattattgtagtacaagaaagggatctcttacacaacttatgcctctttcatatttgctttaaatatttttatcttacacaatagaaagagaataattcaagcatatgaatatatgtcctaaaatgttgtttaatattgtaaattaccaagcttaatactgtaaataaaccctgtcaatatctacctttgggcagaataaagaaccagataaagctattttgggacctatttttgcttccttttcttttctgatacaagtgttcttttaaaaaatctaatcttcaggaagaatgtattatcagtcatttacatcatagtttaaatttaaaataattaactctctgtatattattatgaggacttcgaagaagattaactgataaattactttcaaatccaggccccattatttattagctaaatgtaattagacaactcatttaatcattttttgtgcttctgtttccttttctttaaaattaacataattccactgacagtattggtatctagcaggtaggtgaggatttaaagtagatagcccacctaatgaactttgcacagtgcctaccacacagattatttagtactcattaaacattagctattagttattattcatttaataaatatttattaagtgcctactatgagacaggagctttcctaagtgagagtattctgcagttataaaatcagcattctattaatttatttgctgttacacatgcaaaatatgtttgctcaaatgttatatctagggcatgagtaatatgcaatattccatattaaaatgtgatacttaattttgctattgaaaatagtaaaattaattgacttagtggtgaggacttgggcaaactacttttctgagtgtctaatcttgctcatctattaaattgaggattttgttgcatgatcaatgttctaacctctaaaattccaattctgtgaacatagaatgtttaggaggccccacaatccaaaatacaggctgtaatcatggcatctgtgagttaaaaaaacacctagagtttaaaataaattgttttctataatattttgtttattaatacaatttaagattgatacaaatttactgcttttctctaataatttaagaaatttagtgatatgggcagagttcaacataaaatagatattcaattattgggtcatatcagatgttataaaaaaagcagaaaattaaaatagtttcgtgatcttgtaattgggcaatgatataaacaatcatggtgaaacagtgccccagttacatggggttaaaaatactttcttcttccaacacagaaatagcaaatagagcctcccctcccatatgcaactagaaggggatatcattgtgcctttggagagaaaaaaaaatcatgctcgtttttttcaggaatgcagagtaaatctacttgatttatacaaagaatttagttctttccttgtaatgctagtaatccaagtggaacctggtaaaaacagcaagtaaaatactgctcagattggcattccaaaggtgaccctctttctccttgtcacttattttttcctattagcgaaaacaggtccatgatcatttgggggaaggtttgactattgtagtatccagatgccaatcacaccagccttttaaactgcctttactggtgaccctgcccagaaatcaggaactgcctttggggagatctttgtagcaaaccactggggagatgagcacacacatgcacctggatataattcccttttatttgtcttcacgagaaatgtgattactgatgttgaatatcttgcagatgagaactctatacagtttcttcataataatgatgttcaaggacactaaatgattgtcatacatttttgtatcatagtattcaccttcccaaaaatggttgaactaaaatgctttagaatacgaaatgcaattaattaccaagggatgaaaaaagaaatgcaaccaccaaaaatcaatatgtttaagagcatattctttatttcttttactccataatatttatgccttattgttattagtcttcttatttttagtgaattgggacatttaagcacttcattaaaagaaagctgattataagcatttatagtgaaggtgcaagtagggcaaacttcttcagatagactaattagtaaaagcatattaattctgaccttcaacacccttggtgtcccactatttgttttccttggagtgggagcaagtattttgacagaaagcgcttgaaaaaaataaaaaacaaaacaactaaacaaaaccccagttcttttcaagacagatttaaatcacaaattttacctaacctttgatgttagatttcagccctagttattgaaaaacaaatataataatctactatgtgtcctagaagtttaatgaacaggcagtaattatactaaaaaagtaaaggaaagagtaagaacatggtatgtggcagcaaagtaaaggagaaataattctcaggcagtgacaaaactctgctgtgttttctgattatgaaacaatcagaagagatgagaatggttgagttaatcagtttggactgaggacaaggatcaaaatgcatatcttcttagaataacagaagtcacactgactcatgataactagagatatggagatgtaaatgtcaagactgtttattttttattatatttagtagagaggtataagtaagttctcaggaaatgccttcaggtggcattgatggcactgcgagatgggagaggaccattatttccccattcatcaactacatcataagaccaatttaagaatgcatgtgttttaacccttgccttttaaaagtgacttattttgaagtacattcctgtaagtctcccttttttttgaaatattaatgttaggtaactggtaagctgagccaacactgaaaacaaactgtttttgttagctgttagcagtattttagttaacttaaagcatctgtttttgtccatcactgttaaaatttttcaaaatgcattgtcacctgatatataaaccacacgtgtgttcctatatactcatcccacatgcataaacatatgttttccagaaggtctctgggttttccgcaaccactcaatgggttctccttgcccactgcctagacagagccagtttatcaagacaggggaattgcaatagagaaagagtttaattcacatagagcctgctgtatgggaaacttgagttttattattactgaaatcagtctcttggagagtttggggatcagagtttttaagagtaatttggctggtaaggggttgggaagtgggagtgctgattggttgggtcggacatgaaatcctagggagtcaaagctgtcctcttgtggtgagtcagttcctgggtgaggaccacaagatcagatgagccagtttatcaatctgggtggtgatagctatttcatgagttaagggactgcaaaatatctcaaacactgatcttaaattttccaacagtgatgttatccccaggagcaatttggggaggttcggaatcttgcagctggaggctgcacggcttctaaaccatcattccttatcttgtagcaaatttgttagtcatacaaaggcagacaggtccccaggcaagaagggggtctatttagggaaaaggctgttaccatctttgtttcaaaactaaattgtaaactaaattttttcccaaggttaggtcaacctttgcccagcagtgaacaaggacatattagagtttataagtaagatagagttatttaggccaggtctctttcactgtcataattttcttagttataatttttgcaaagtcattttcatttctatatagtctcaaatatacctgctcaaattgtccagtgtcttttctgccagtatgttggcattttggaatcttttcaaagacttcattgcttaaaaaaaatgctgttgcttaatgatattttgtatcaatataacacattaattttaatttccccttcattcagcttaaatgggttggaaaaggaactttgagcagaaaaagaatcataattggtcagcaatggtagtgaaactagcacctttgaagatgattgatttttgatttagtaagatgaattattttgtgtatgttttcttgaaaaaaattagttaaaacatttaaaaatgtatagttatagttattttataccagttacagcactcttgaagtgtatagattaagttcctttctattcagatagagaggaatctgggaacatcattgtcaaaatgccatctctttcaaaacttggttccagtgctctaaagaaatgttttagaagattatgcactaatgttactggcggcaaattcatatagatctgtagccacctcaatttttgcattctcagaagaaagaatttgattgaggggacataaggcatattaagagaccaagacaaattttagagcaagagtgaaaatttatttaaaaattttagagcaggaatgaaaggaaataaagtatacttggaagagggccaagtgggtgacttgagagatgatttgacctttacttggggttttatataatggcatgcttccgaggtcttgcgtcccttctcccctgattcttcccttggggtgggctgtccacgtgtacagtagtctgccagcaattgggagaagttgaatgtccagtgtgtttactgaagttataggcatgctcacttaaggcatgtttccttgccagttaagtgttcccagaaggtcatataccggttaagcgccaacattttgcctcttagtgcgcatgcttgagcccactcacccatctcctgagatctcattgggaagctgctgatcacccgtctcaggtgtttctatctatagggagactgcctttccctggcactggctgtgactgattcttattattttagagagatagtgtaacaattatcacctgacggttgcctgacatttctggtggggcgttgtggggggcggtgcttctctgaccctgcccatagtctaactgccaactgtaacactaacagtttcattgaagtgggggaaatgttaagtaataatatgaaaaccatatttaaggtatatatatataaggaggctcacaaacatagccataggccgtttgtttggagctttgaaaagggaggctcagttccttgactgatgagcagtttccatttggaaattctttgactttagtgcaacttcaaaataaaggcatgagacagaaggagagaggaagaaaccctcaagccatctaaagtcatctctggcaatggtggccatatcattttcacaaaaaaggggcatccttggggaatatcataaaggaagaataaggacttaagggaaatgtgtgggaatgattgactgatcctccctccagcagaaaattaaaaatcaatgtagatgcatttttctcagcttcttcccttcatttttttcctctcctgaaacctgttcctccttccgtgtgtaccatctacagtgaatatcactattgccttaggcggaaaccttggaactctccttgaattggcacttgaactattcactcatttcctcccattctattaatgattcctcctctggccgttcttcctcggatacatctcttggaactacctgctggtcctacgctactgcctagtccagacctatgttgtgggcttctctgccaacagtttcaatcttctccaggctgttcttcaaacgaattatttttattggcattctcttgtgtaaaaccttttaatggtttcccagcgagagatgcccttcacaaacccttttctgcttacctgctttctacctatatacctcctcatctctcccaccaaggactggtatactctctagctctagaccattttttagtcccagtgcttgaatatagcacactctctcagatgcccatctctttgaacatattgatacctttgccgggtatgccctcatctatttgcaagtacttcgctttcctttcacctggctaattgctactcatcatgaaagggttagcttagctgttcccctaaataaacttccagcaaccccagcctcctcccatgccaaatctgggttgaggacctctcttatgtactactatagaaaccaacaattactctattttagctcttaccgcattctattaagacaggttgttcagggagctaagctatgaggacgcaaaggcataacgatgatacaatggactttggggactcaggggaaagtgtgggatggggtgagggataaaaaaaactacacattgggtacagtgtacactgttcaggtgatgtgtgtaccaaaatctcagaaatcaacactaaagaacgtattcatataaccaaatactgcctgttcccaaaaacacctgttgaaaaaaaaaaaaaactggttgtttgcttatctatgtttcatgtagactgaaattatgactatctttttcatgcttaacacatttgtgtcttgcacggcataagacatttaccagatactcaataaatatttattaactaaatgagtgatagaaaagagggaaatccaaaagatggatcacttagctgtaagaattatttaatggcaaaattcattatgcttttgaatatagttcacatttttaaatccacgtttttgaaagtattgatggtttagagtgataactcaatttgtttagtctctattggccttagatgtgtaagaaaatacattttaaactgtatagtaccagagacaaaaagaaatttcttgttaatggtcctcagttgctggcaaagttacttgtacaccagttgttatagctagagtgttatatcagaaattgttttctgccccaccatagctatcacattgtgttgctgaaaactaggtggttgcacatctcttagatacatgatctccttaggcttattaaattttgaggttaatgaatattttgacacttttacctatacatatcattagggcttattgcaataggtttaagatgacagtcataataaacatatacagtacaataaaaagcacttttaatcttgaaagtgctttaaaaacaacagtgatcaatgctatggatggattaacagcatcatgctgattgaattctatttcaaggacaatggaggtattgatgttggcagtctagttcagaaagtggcaatggctgtagtaaatggtgcaggttctggagtcagactccccaggtttcaaatctggctccccaacatgctggtgtgcgactttgcacaagtcattcccccagtgtgaaactcagtttcttcatctgttaaatggcttattgtaaggtttcaatgcaatcactgtaaaggattagtacacagtgtcttagtattgtgtatgcatttgtgaccagcattctgtaattctggacttcaattatgtgcctttccattgcatacatatattttatgtccctaagtcacataaatcttgttgatacttctttatgacctctctctactacacggtactctgatcattcactttattttactcattctgtgaacctctgacctgttttttgttgtcattgttacctttcttcttccactagaagcatacatgttctgcatctcatttctccacatctatttaaacagccaactttaaatgttatgtgtacttataaacctaactctattattccccctgtcttcataatcagtcttctcgaaaactaagactctctatgtgtcattttctcatggatcaattactcctcaatctactgtcatttggattcttttcttccacttctttattgtaaatactttcttctagattatcaatagttttcaagtcagagaactttccttaatcctcaccctatgtgccaataaataatattggtgccattttttccttttaaaaaataagaagaaactaaatatttctcactaggtttctccttctattttccctaaactgtgtttcaagctttgatattgctttctacatccacctttaaatggaagagttcaatcactcattcggttcgtatgcagtttttccttatttcactccactagctgatgttatgattgctgtcgtaaaaaggatactgagcaacacaagaatgattcctaaccttagggagcttaaagtcttgcagtgaaatcatgcatcaaacatgtaattaagtaattacaagtgacttctgtctccagctatgaagcatatcaaaaaatcctcctgctgagaaaagaaatagaagctggaaaaaatttctcaaaaatatggttaaagacataagtgagtaacaaaggcttctaggacttgtgggatcaagatcctagatataagaaaaaccatgtaggtgagccttttaaattatctttgtttttccttctgttttgtttgttaattcctctattgcatagtcttagggaaaaaaaaaagacaggcaaaaaattagagtctaggtggggtcctggtatacatgccaggttttcaattgaaatcctagaagagcaaatcattaataggctcttcttcctcagataaagcctcaattattcttaactactaattatactgagataaaagttatttttttaccaaaaatatttagatatttgctgaaagatcacatcaaccagagtcccagagtgtgcaattttttcctatacaatgtcgggcattcaatcaaatattaacaggcataccagaaaatagggccaaataaccaaaagataagataaataaaataaaaaatagaaacatatcctcaagtaattcagatatatggaaatatgtatttgcatacacacataggcatatacacacatatacatgtagatatatatgcatatatccagacacagactttaaaataactataattaatattatcaataaaatcaatgaaaatgttcagaatttaagtagcaaatgggaatatattagaataggaattttagagcggagtaacagctgaagttagcaactcagtagataaaataccaattccatccctgataaagtaaatagccttgttcttaatatcgtatgcaacaatgtaagttgggaacaaaatatatatgaaacacctatttgtagccaatatatagcaacagtgcagagctattatgcttaagtgaagaaaagcaaatgaactgagttgcacacacctggaattattgagctcaagcagagacattagtatatctggtaaaggaataaaaactggaattcagggctacaaaagtagatttggagggtaggttcccagagagaagattgatgctgaaaaataattcaaaaattctgtgtaacaattcttttttgggtgcttggccaacatttagaataatcctatgagaaacatagtagagaagatctgcttggtagttggagctaagtagagatttcacaggcaacatagagctaaggatgcacacatggagtttggacttaaccacagtagagaaaccttggtgaatactctgagctttcactcgactctccaaaagtccgtcctttatgagtaaattcccatgctttaggaataagggctattctttaggaacattgagataattgaaacagattcaccctagtgaagcctaaagccaaggctgagtaaggtcgaggtaatctggtaattttacttcccgtcaaaacagaattttgtattcattagtaaaaggtaaaataatccagaggttttactatgcgtcatccatgaagtgaccaataatgaaatgttaatagtcgatagaggcagacaaagacttcaaaataacttcagttaatgttaagagaaaataaaggacaaggtggacagaaaggatgataagataaaaaatatttcaatgcaaaattgaaatctgtacagtaattaataggaaaaaatggtatgtaaagtaaaatacctgaaatgaagagaatattgataagttttgccaatgaaacattgcagaaggcaagattagagaactcaacggtcaattgtaattgtccaaactgaagcatatcgagaaggaaatgaaaacatgaaaaaaagaacaatgaggtatttgaggacccagaaggaaagagtgaaagaatgagacaatagtaatattgtagaatagccaaatattatcaaatatgaaaaataagttcacacatagtttaacaaagtttagcaaaccataaggagggcaaatataaggaaagccatatccaggtatattacagtcaaattgcttaaaataaaagacaaagaaaaaccttcaaaagcacctggggagggtggggagacttattaccttcagtggagcaaaaataagaatgatgtctgagttttcaacaacaacaataaatgaatgccagaatataatggaatgatactttttaaatgctaaaattatttttttaacaataataacaacaaaagaaaactaccagtcaagatttctgtacccaggaaacatatccatcaaaaatgataaaataaaatatttttcttaacaaaagagttgaaaaaagttatcatcaaaagactggcattataaaaatcataaagtgtattaggacataggaaaagatcccaaaaggaagcacagagctgcaggaaagagtgcaaacctctagaaatggtaactaggtgtgtaaataaaaagtaatatttatgataaaaggcataaaaatcatactttgaagttgataacatgtaagaaaaaatgtatgacatcaattattttgtcacaaatgatgacggggtctatatggagctaaactgtggtaaaattcctaaaaagttatggaagttgaagaattaataatatgaagtaggccatagtagatcaaggattcagattatgatgccaaaggtaacaaccaaaagaatgatttagaaaattaatgtaaggaaacactaaatgttaaataaacacaggttaagctgataaaggagtttgagggtggcaagaagaagccagaaacaaagagcaaatgtggggaataaaaggacaaataccactgtggtgaacataaactcaactatatcagtagttgcattaaatctaaatagtctacccaaataagcataaaagttctcagattgatttaaaaaataaaaatatatgttgtttattcttataaacatactttaaatataaagacaaaattcgaaaacaaagaaagagataagatgtattgatatatagatagattttaagacaataaatgttagtagacaaaatggaggacatttcataatgacaaaaagatcaattcaatagagggacatataatcctaaatttaggtgctacttatagtttcagatatgtatataaaactgaagttgacagaaataaacagagaataaatatatcctcatagttgaagatataaatccccatctaatattttgacaggaaaagtacacaaaatattagtataactatcaaagatttgaaaatgaataaacaattacatctgtatataaaacatgtgacattttataagtgttgtcatatgtagaacatcacttccaacaactatataatatgcatttttgaggaacacataggacattttccaaatagttaatatcctgggctatagaaatcgcataatttttttttttaagagacgaggtcttactgtgttgctcaggctggtcttgaacccctgggctcaagcagtcttcccacttcagtctcccaaagtgttaggattacagatgtgatgagccactgcattcagcttgatctcataatatttcaagttctctgacaactgtgagattaaactagaactccaaatctaaaacataatccgattggaaaatatccctggctcaaaaagaaattatggaaattaaaaattatttttatctaatgataataatgccttaatacatataaaaacattgtaggatggacaatatcaggaatctgatattgctttatagctttaaatgcatatattagaaaaagggaatagttaacaatcaattagcttcccactcaagaagaaaccaggaaattaaagcagcatatgacacccaaaaaatatttgaataaaagaaattataaaaataagagaaatcaatgatatagcaaacagaaatgtaatggagaaaataagaccaagaattgattctagaaaatttggggaaaaatttctttgcaagtgatcaaggaaaggagaaagtacagattactactctcagggatgcaaagagccattactagaaatcttacagacattaaaaaaaataataatgtattaagaacagcactacgctaaaaccttgacaatacaggcaaaatacagagatcctttgcatgggagaaaaatctccaaatttaaactgacacaagaagatctagaaaatctatgtggtcctagatgtgttttaaaaatgaaatctatagttaagtcttttacataaagaaaaccccagggaaggtggcccgattggtggatttcatcaaacaattacagtagaaataatagcaatcctacaaaaaaactcttacagaaaatagaaaattgcaatggtttctatctcattttatgaggtcagaagaacttatacactaaaatctgacaaagaaattaacataaaggaaaacacaggtcaataataatcacaaaagtagattctaatattctctgtgtgtgtgtgtgtgtgtgtgtgtgtgtgtgtgtacataaataaaatgttatatcatgaccatgcaggttttattccagtagtgtgtaatcttttcaaaatgtatgtgattcaacacattaacatagtaaaaatgaaacattctaaattatcaccacagatttaacaaatgcatttaataaaatataataactattcataacaattctcagcaaactagtaatgaaagaacacatcctaataaattgtttttgtaaaagacctctaatagtaaaatatcaagtgctttttcccagaggtcaggtacaggacaaggaaattcactatcaccacttttatttaatgttgtactggaagtatagtactagccagagcaatatagcaataaaataaataagtattaggtatgtcaaagaagaagtaaaccatctttatttgtagatgtcattatttttattgatgtcaaaataatatataaactattcagtttactcagtaaacttagaaaagtgtcgaataaaggtcaatgtacagaaatcaaatgtttctattgaatagcaaaaaacaagtagaaaatgaaatgtttaaaagtaccatgcttactagaactaacacacataaatgacttagaaacaagtctgctaaaaggtaatgtaggacctccactctgaaaactacaaaaaattactgtgagaaattaaagaccaaataaatggaaagttacgccatgttcatggatctaaacacttaatattgttaaatagcaagtcttcctagtttgatctgtagaatccatatagtccctctcaaaatcccaggatttctgtaaaaatttacaagctaattttaatatgcacatgagagaggaaagtacttagagtagccaaggcaatactaaaaaagggcaaagtaggaaggcttatgtatcaagactaactataagactgcagtaggtaagcatgtatagtataggcaaaagaacagataagtatagtaataacatattgccacataaataccccaaataaatacatatatatgcagggcacagtggctcacacctgtaattccagcactttgagaggccaaggcaagagtattgcttgtgctcaggagttcaagactagcctgggtgacatagtgagacctcatctctacaaaaagctgaaaaattagctgggcatggtgaggcacctgtagtcccagttactcaggaggctgaggtaagagaatctcttgaacccaagagttcaaggctgcggtgagccttgattgcaccactgcactccagcctgggtgacagagcaagatcctgtctctaaaaaataataataatacatacatacatatgtgctctaaaaagcacatgcaaagttgttcatagcaactttatttctaataatcaaaaactggtaacaatccaaatttctatcaacagtagaatggataataaattataataaatttattcagtggactgcatatagaaataaaaatgagccaactattgcttcagagaacaatgtgggtgaatcttataacctgttagtgagtaaaagaagctagaatctaaagagtctagtattctatttatataaatttcttctttttcattttaacatttattttaggtataatgggtacaacatgcgggtttgttacttggctatattgcatgacgctaacgtttgggctatgggttccattacgcaagtagtgagcgtggtatccaataggtagtttttccaattacagtcccctccctcccttccagtgtctgttgttctcatgtttatgtccatgtgtgctcaatgtttagctctcacatataaatgaatatgtagtatttggttattgttccagcattaattcacttagaattatgaactccaactgcatccatgttgctgtaaaggaaatgattttgttcttttttgtgattgggtagtattccatggtgtatatgtaccacattttctttatccagtccatcattgatgggcacctagattgattctgtgtctttgctattgtgattagtgtagcaatgaacatatgagtgcatgcgtctttttggtagaatgatttatttttctttgggtataacaggattgctgtgtcaaatggtagctctgttttaagttctttgagaaatctccagactgctttccacagtggctgaactaatttacatttccaccaatcgtgcataagcattctctcttttccacagccttaccagcatctgctgttttttgactttttaataataaacattctgactagtgtgagatggtatctcattgttgttttgatttccatttctctgacaattattgatgctgcacattttttcatgtttgttggttgcttgtatgtcatcttctgtgaagtgtatgtttggctgggcgcggtggctcacacctgtaatccagcactttgggaggccgaggtgggtggatcacgaggtcaagagatcgagaccatcctggtcaacatggtgaaaccctgtctctactaaaaatacaaaaattagctgggcatggtggtgtgtgcctgtaatcccagctactcaggaggctgaggcaggagaatcacttgaacccaggaggcaggggttgcagtgagccaagatggcaccactgcactccagcctggcaacagagcaaaactccgtctcaaaaaaaaaaaaaagagatagaagtatgtgttcatgttctttcccattttttaaatggagttgtttttcttttgttgatttgtttaagttccttataggttctgcatattagaactttgtcagatgcataatttgtatattctgtaggctgtctgtttactctgtggatagtttcttttggtgtgtgtgcagagacactttagtttaattaggtctcagttgtccatttctaaagctgcaaagtgaaatcagtggtgacagaaatcagtagatggggtaataactgaaaggaagcaaaaagaagccctctgagattctggaattattttataaattagtctgagaggagtttataagtgtagatttattttgtaaatgtccatcaaaatataccttgataattagtgcactttatttttgttatactttactttgaaaagttactgaataaatgtttcaagcctgcaaagtccaaaaataagatgtgaaaaaatactgtaacataacagaagcactcaacccagtctagaggattagtgaagacctctccgaggatgaggcaagttgagttagctaggccaaaaaaaaaaaaaaaaagaaaaaaaaaagaaagaaagaaagaaaaagaaagaaggaaagtaaaggagtccaggtagagaaagtatcatgtatcaatgtcttaatgtgggagatgacatgtacataaataaacaaattagtaagcaagaaaaacttggaaattctaatataaattagattcttgccagaagggtgcatggtgaggctgaaataaaaaaggggccagatcatgcaagggccatcacattgaaaattttgaacgtaattttattcatctttataagaccactgtggaggttacagcctgataccaagaatgtttttaagaagggcatgctgatattttcactgatattgtacatgtaccattcatagattgactcactaaaagttgcaattttatttaatcatctaataagattatttatagaatgtctgcaaaatgttagaagatcttccttataagaattagcatagctgaatggtttaaaaaaaaatgaaattctgaatcccagcatggatctattgcattcttgcaattgtccaaggcaaaaggttctgcttgcctgcttcataaacaaaatcaattaaccgagactgcagcattgcagtaaaaagtttaatttaagccaagccagccaagtggaagaactggagttatcactcaaatcagtctctctgaagtcttgaaggttaggatttttatggataatttagtgggcagaggggctagggaatgggtgctgctgataagttgaagatgaaatcataagagcatggaaaatggtcctcctgtattaagtctgtctctgggtggggcaacaggatgggttgagtcatgagtcattagtccaggtgggatcagtttgaaaaacatctcaaaaaagcaatcttgggttttacaatagtgatgttatctataggagcaattggggaagtcaccaatcttgtgacctctgaccacattattcctgaacagtaagcaattataaaaattacacctacattttagcagcattcaggcccctcccgtaatcctattcttgtggcctttcattagtcttatgaaggtggtttttagtctctgagaagggaggaggttagttttagggagggatgatcatctatgatcatctttgctttcaagttaaactatgaactaaatttctcccagtgtccaggaatggccaaagacagcttgaaggttagaagcaagatggagtcaactatgtcagatttctcttactgtcgtaattttgtaaaatcagtttcatcctaatctctggagaagtacctagaaatttgcatttggataagatatacagatctacactattaaagacagagctatcttacccacccccaccccagctatttgtctaagggaaatgaaacaatttgtacatacaaaaggctggcacacacatacgcattgcgcctacattcacaagagccagaaactggaaacaactcaaatatccatcagtaggtgaattgattaataaaatgtggtatatgtatgtgatgaaatactagtaagcaatacaaaggaaagagcagaagaacacttaatcgtaattccacttatataaaattcttaataataattaatgtatagtgacaaaaaggagatcagcagttgcctaggcctgaggaggagggggtgatggaaatgctgtgtaacaatcaaggtagtggttttacaagtgtgtacatctgtcaaaacatatcgaactgaaccatttaaacagatgtgcttcagtatatatgtaaatttttatctcactaaaattaataaaatattctccaagtgattcttgcaacattcaagtatgggaaccattgatttacactgtaatgaacaagttgctttaactttgtttggaaaccaaacaattttaatattattttaccatttaaattctgagctctttcagatagaaacttaagcagtgtgtatactgcttatcactccaaatttcacctgaaacaaattggtatatactgtttgtcataaaaataagaaaatgactttcattaaattatgctgacaatgagaatcttgtacaatttcaatgaaataactttttttaatgaaatagggtttcttttgatctcattcacattcagaagggaatttttgtaaatagaaaggactatattttattttatcctaagaaggaatttagtcagtaaaaatatgaaatagacacttgagtatacagttgaccagttattgccttgaagctactgcacctctgtaatgtatttttcatagcttatataatccgtgttaatatgctacattattaagttcaactgtgagaaatatagttgcttgaaaacagatttcttctgcatacttataaattcagtagttggaaaaaaattaaagaaatataattaaagattgcaaaatcaatttgaccctcacttaaaatgtgttgagtggaggcagcaagcagcagcctacatctgatgctgttctctccttgtttacttcacaaaactgtgcaaattagaactttaatttacagagctgttaaagcctcattaaaaactttcagcaagtatcctattttgagggtttttttccccttatatctaatatgcagcattatctctgttttgtgggcatgtatgaggcaatatctataggcatattaatgtaaactgcatatatgaaatgaaagtttttcacatggaaaggacactagtggtgtctgtcaattgcttcccaaagtgattaatttctccatttacttggtgtttattggcatctactaacactggatctctgttggatcataggaatataattgggctccagtgaaatgggagaattccctgacaccctgttgcaggatatgtgacagaggtgtggcttgtctgcttgaccgccttgcactcaaactccttgcaggagagggagcatgcagatgggcaggtgtgggagccagggcaagaacttttgggctccagtcccatggtagtatctaggggtgggtgcttgtgactcccaaagccccagtgggtgtgttacaatgcccttttagctgtgccatccacatatggcttaagtgttaaccagctcagtgctttcttggtacctgggttcttgtccggtgtccaagaagaatcaggttacatggataaactgaaggatggtaaatgtgggggattttattgctggatggaggtggctctcagtggaatggatgggaaactggaaaggggatggagtgggaagatgatcttcccctggagtttgggcatccggcggccaatctcctctctgactaaccccagccgaaatcctctcaatgttcagatgctccttttcttctcttcttctatgtggcactgctctgctattctcctgttcctctgctcttctgctcatggagcctggggtttggggtttatatgggtataggatagtggggcatggtgggccaaaaggcaacacttgggtgtgaaaacagaagtgcctttttttatttagggctgtgggtttccaggcttcagggtggggcctttgccagggaactgccctcttctacccagcatttccctgcctcctgtctttatcaccagtagacttgttccctgctcttacaggatttcatgcgtgtccgtgtgaagagaccaccaaacaggctttgtgtgagcaataaagctgtttatttcacctgggtgcaggcgggctgagtctgaaaagagagtcagtgaagggagataagggtggggccgttttataggatttgggtaggtaaaggaaaattacagtcaaagggggtttgttctctggcgggtgggagtgggggtcgcaaggtgctcagtgggcaggagtgggggtcgcaaggtgctcagtgggggtgatttttgagccaggatgagccaggaaaaggactttcacaaggtaatgtcataagttaaggcaaggaccggccatttacatttcttttgtggtggaatgtcatcagttaaggtggggcaggacatattcacttcttttgtgattctttagttacttcaggccatctgggcgtatacgtgcaggtcacaggggatgcgatggcttggcttgggctcagaggcctgacattcctgccttcttaataagaaaaataaaacaaaatagtattgaagtgttggggcggcgaaaatttttggggggtggtatggagagagaatggacgatgtttctcagggctgcttcaagtgcgattaggggcggcgtgggaacctagagtgggagagattaagctgaagggaggtcttgtggtaaggtgtgatattgtggggatgttagaagaaacatttgtcgtatagaatgattggtgatggcctggatatggttttggatgaattgagaaactaaatggaagatacaaggtccgaataaaagaaggaaaaaaatgggtattaaaggactaagaattgggaggacccaggacatccaattagagagtgcccaagggggttcagcgtaattacttgcttggttggcaagtttttgggctctatccttgagtttttttatgttgtcatacaccaggccagattgatttaggtaaaaacaacactcctcatttaagaatatgcagagtcctcctttttcagcattgagtaagtcaaggcctcggcggttttggaggacaactgcagctaaagagtcaacttgggcctggaggactgataaagtttgtgatatgtgtgtgatgctagcagagaagtcattagacaggctacagaaggtcatgacagacgttgaaatgcctgctattccagtaccgagagcaatcatggaggcagaaagtcctaaaccgaccatcaagggaattagtggaataactcttttttgtcatgtcggtgtcatgaggggaacagggagctcttcggtcccatttgcaaattgaattttgggggtaaggaagactagtgtacatgtggctgtccaattggcaggtagacacatgtaggtagaggatccacagaggaagaagagaccttgtgcgaggcaaaactggagatgtaaagtaaaaaggtgagaaggagtgctgaaaggggtgtcttgtacccagactcctagggatccacctagggcggcagctgtcagaggttgtaatggggactgatggggtaactgcgtagagggggaggttcgattttcatggtgtatgagaaaacgttgagtatctacgagcaacctttcactgttattttcggggctgggtataagtaaacaagaagagggcctgggaggagagtctgatgagcaaggggaaggtagccaaggatggagtgaaatacagggcacgtgtcttcctaagcaataattactgctaatgtttttaagtttgtcagtattgatagagggcttgtctgtaatatggagctggaaggctccaattgtttcagtgatgtgtgtagttggacttcggagatgaagagtaaaggaacatcgagaaggtgaaaggttacccaggggaattccagtgggtctttgccgagagatacataaaggagcagccacaggaatagtagtttgtgttgtgagaggtccaaatatggggggagtagagttaatataaggagaaaggttttttaaataagtgcgaaggagggcggcagcttgctgatgtgaaatgtctggggaagtcttgctgaacctgtctagaaagtaaatgagttcttcaggagggtaaaggtgagggctgttaaaggaagttcggaggtgtagggagacgggagatgttgcccagtctgtctgtaagacggggacagctgtgtaggcactggaagaaagggaaatgcaaagccagcagttgttcgctaaggagggattagaagcagctaggagagaatgggttaaggttgacagtgtggtggagatagctggggagaggtagagggtgacataagaatgggaatgagaataagagtgagtataaaagtaaagaatagaacttcatcagggtggaagtattggagggtgccttgccagcaaagatcatctatccactttaagagggagttaagagtggcagtttggggatagcaccaagagatatcagctgtgatggcttgaagaaacagtgtaaaccagcagtgtaaacaagagtagggcatttataagtagttgagaatggagaataggagtatgaccggacagaagatagtagggatgactagttttttggggctcggcctaagtggtggggtgacttcgtaaagccctgttgcaaaaagtagggtaaggacgaacagacctaatagaatgaagggatgtattaggctcataagggttattactgttcttcagaaatacgagtgagtttaagggaagtgggggagagtacttgcgacttccaggaggaagaggagggattaggctggctgtccgatggacacagctttattctggaatggtgaacccagtggggaggatcctgcaggcggacggcagtcggggtactatagatgactaagtagggtccggtccattgaggttatagagtttgaggggtcagattcttaacaagaactgatcgtccagctaggttgtcttcatatggctggggatctggagtaggcaagagaagattagcagcctggcgaatttcctgtctagcctgctagagcactggaagatagtagcctagagggctggtgtctgggatgaggttggggccaagcaagaaagtgcgtccatataaaagttcaaatggactgtaccctgtagcatctcggggacaggctctgactctgagaagagcaagaggtaaaagtactgtccaatcctttttaagttggaggctgagcttggtgaggtgtgccttttaaaagaccattagtccgttctacctttcctgaagattgaggacggtaaggggtatgaaggttccactgaataccaagagcctgagaaactgctttggtgatttggctagtaaaggctggtccgttatcagactgtatagaggtgggaaggccaaaccggggaattatgtctgacagaagggaagaaatgaccgtggtggccttctcagacccggtaggaaaggcctctacttattttgagggcctctaacagtattaaagcagcggcagccgctgcacacagacatgagggctaggttaaaacagtaaggtcaagttgtttggacagaaaggctacagggtgtggtcttggctcttgtgtaaaaattctgaccgtgctaaccatgcctaggaaggaaaggagttgttctgtagaaggtgcttgggtttgagagattagtcggacaggattggcagggagagcacgtgtgtttttatgagaattatgccgaaataggtaacagatgaggaagaaatttgggcttgattgaagtaatgggggctgtctgtgaagctttgcagcagtacagcctaggtaatttgctgagcttgatgggtgtcagggtcagtccaagtgaaagtgaagagaggctgggattaagggtgcaaaggaatagtaaagaaggcatgtttgagatctagaacacgataatgggttgtagaggcaggtattgaggataggagagtatatgggtttggcaccacagggtgtataggcaaaacaatttggttgataaggtgcagatcctgaactaacttgtaaggcttgtctggttttaggacaggtaaaatgggggaattgtaaggagagtttataggctttaaaaggccatgctgtagcaggcgggtgataacaggctttaatcctttcaaagcatgctgtgaggtgggatattggcattgagtggggtaagggtgattaggttttaatgagatggtaaggggtgcatgatcggtcaccaaggagggagtagaggtatcttatacttgtgagttaaggtggggggatagaagaggaggatgcaaaggaggctttggattgggaagaagggcggcaatgagatatagctgtagtccaggaatagtcagggaagcagataatttagttaaagtgtctcagcctaataagggaactgggcaggtggggataactaaaaaggagtgcttaaaagagtattgtctaagttggcaccagagttggggagttttaagaggtttagaagcctggccatcaatacccacaacagttatggaggcaagggaaacaggcccttgaaaagagggtaatgtggagtgggtagcctccgtattgattaagaaggggacgggcttaccttccattgtgagagttacccgaagctcggcgtccgtgatggtctagggggcttccgaggcgatcgggcagtgtcagtcttcagcccctaagccgagaagatctgggaaggagtcagagagccttgggccagagttccaggggctctgggagtggctgccaggtgagttgaacagtccgattttcagtggggtcccacacagatgggacgcggcttaggaggaatcccgggctgcgggcattccttggcccagtggccagatttccagcacgtgtagcaagctcctgggggaggaggttctggaggaatgcctggccgctgcggttcaggcgtttggaagttcttgtgtgctggagatgtggctggggtttgtctcacagtggaggcaaggaattgcaacttttttctattatggtacaccttgaaggcgaggttaattaaatcctgttgtggggtttgcgggctggaatttaatttttggagttttatttaatgtcgggagcagattgggtaataaaatgtattttgagaataagacggccttttgaccttttagggtctagggctgtaaagtgtctcagtgttgctgccaaacaagtcatgaactgggctggatttttatatttgatgaaaaacagcctaaacgctatctgatttgggataaagaaaaaggagcattaaccttgactatgcctttagctccagccacctttttaagagtaaattgctgggcaggtgggggagggctagtcacggaacgaaactgtaagccggaccaggtgtgaggaggggaggtgataaaaagattatagggtggaggagcagaggctgaggaagaattgggacctagctcggcctggcgaggaacaacctggggaggaagggagaggtcagatgggtctgtagaaaaggaagattagaaagactcagcgatgcttggggttggtactgaggggacaggcaggagggaaagaaggaagatttgggatgagtttaactggtcacagagactaggaagggactgatgtgtaaaagaatgcctggatgtcaggcacctcaggccatttgcctattttatgacaagaattatttagattttgcaggttggaaaaattcaaagtgccattttctggctatttggaactactgtcgagtttgtattggggtcaagtggcattgcagaagaaaataaggcatttaggttttaggtcaggtgtgagttgaagaggttttaagttcttaaggacacaggctaaaggagaagaaggaggaatggagggtggaaggttgcccatagtgaaggaggcaaaccctgagaaaagagagcatagagacacggaggaggggagtggggttcttgccctccagaaaagcagagagggggttgggacacggaaataagggattggggcacagagataagaggtcagggtgcggaaataagggattggggcacagagataagaggttggggtgcggaaataagcgattgggggtttcttgccccctaggaaagcgggacttgccgctaagggtgaaggagaaggggttgaggggtacttgcccctgccccaggaaagcgggacttggcgctaagggtgaaggaccaaggcaggtgtccctgcgtggtctgacacccttgaaacgtgagtgtataatcagagaggtgtccctgcaatgattaaacaccaagggaaggctgccttcccagtctgtgaccagcgccggagttttgagttcacggataaaacatgtctcttttgtctctaccagaaaatgaaaggaattgaaattaagagaagggagagattgaagtgtggcaccaagattgaaaggagaaagcggttgagggatagtgagggaggttggagaagagagtaaaaaaggccgcttaccggatttgaaattggtgagatgtttcttgggctggtcggtctgaggacctgaggtcgtaggtggatctttctcacagagcaaagagcaggaggacaggggattgatctcccaagggaggtcccccgatccgagtcacagcaccaaatttcatgcgcgtccgtgtgaagagaccaccaaacaggctttgtgtgagcaataaagctgtttatttcacctgggtgcaggtgggctgagtccgaaaagagagtcagcgaagggagataagggtggggccgttttataggatttgggtaggtaaaggaaaattacagtcaaagggggtttgttctctggcaggtaggagtgggggttgcaaggtgctcagtgggggtgctttttgagccaggatgagccaggagaaggactttcacgaggtaatgtcatcagttaaggcaaggactggccatttacacttcttttgtggtggaatgtcatcagttaaggtggggcaggacatattcacttcttttgtgattctttagttacttcaggccatctgggcgtatacgtgcaggtcacaggggatgcgatggcttggcttgggctcagaggcctgacacaggacttgtgggaatataatccatggctgtttgactactctgaactgttatactgctgtttttctgcccagggggatgttaaagccaaaagcaagtaatcaacaagattttttttaatcttaaaatactgaattaagccttaacctttaaaacaatttttgttgtagacatagatttgctatttgtttcagacatcctttaggcttttgatctagcacatgactaccccttcttaccgcattgcccctggatcccccaaggagagacacatggctacctcctttgtaccttggcccttgctgtactgatcacagctagttaggacagctatgaaagcctgctccatgcagaactgattctgttcgcatgagaatttggaattggaatttagagctaaccagttggtctgtgtttgtcctgaacataacataaaaattaattgaaatgagagacagagagaggtgtattgttgtgggggcgggtgagaaagtagggtgagggaagggaaggagggaatgctgaagtatagagcagagagcagcagagaggtgagaaacaggaaaacattcctcaaagcttctccactcccagtccaggaatcttgcctagccttgagttacagaacacactgttatctctggataatacatttcctattttgctcaaagtcctggtgtgaatatgcaaccagagatttttaacgtaaaaagaagctatgagcatatgaatggaagttgaagacctgagaatggactaagggactcagggttagggacagaccctaggaggaaagatggcattcagagatagatagttaaaaaacaatcaagaaaaagtagccagataagtaggtgaagaactgcttgacaatcaaggaaagattggtgaattaggtaatattcatttgcataaaatgttgcccagtggtcaggtaggcgaaaagctgaatataggcagttagattttaccatttttatgtttctatcccctgctacctgactaaactattttcaaaatgtattttatagcttagagccttcccaaaattcctagtattatatataaatttccaatacatattgatagctgaacaatcatattttcctggggtttattttaataatatatgcatttattttagccaatgatattcacaaagctttgctgaaatgtgttttgtttaacttggttctgtatatttttccatgaaaagccatactaaaaggacattttccaagtattaaaaaaaaaagcaaaaaaccctgcagtccagaatgcataatttgttctgggatagttaaaattctaagagaagtcttctttgttctttccttgctctttctttgttctccaaaagggtcgtatttaaactatgggtcatttctcatctgaatagccagggaagattagctacattgctactgatgcacttgatattttctcattacataacatgtggccacagattctagccagtctgataagataaaatgttcataatacttagaagataaaagggaatcatcactacttaagatccctttaaatccaatctgttgatctgtatgagattacatttttggctctcatttactagttccccctaaagaaagtcttgatatagctactgggttcctggcttgtattttgatagtcaaaacggcagtctggatatttttctactcagtagatacaatagaagaccaaagcttcttgcattgtagtcactgaccttgccatgtcatttcatattttctgtagatttggtcctggaaaatcaaatattaagcaagtttgacagttcagctaaattccataaggtcatctatcacattacatacagtaattgattttacgttaattggtctttagtttcatggttcatgtttctggttttctggtagtttccagaaactttcgtgttaaatgaagagctatgctatgtaaataaaattcagtaaaacttccctttcattttaattatgtgcttttgaaaactaattttattgggttctttaaaaaactccgtaggagtcaggcatgaattttctactctttagggcatttcaatcatgaaagaaagaaccatctatatttttcatcatctcaaaacaattttagaccactactatttgtaggtacaaataatgttcattgatttgctttatatttattaatcacctaatagttatgaaatggtgccctaagtactgtgactaaaaaataaatattagtaagttaattttactaatttttatccttaggagctttaatttatgctagataatatctgagaaaaagtcaatagtatgatgctgtttaaagaaagaaagcaactgctatcctgtgttgttgtattagcagaattgtcaaggataaaataaataaggtgaagattagactccacttggcaatctttagcccttgattggagtaccatgttccatttgggaaggcacacttattacaacatagacaagtttggcagaggtttcaaaagaaagcaacaaaaaaatgatgaagggccttgaaaatggggcctgtaagaaaaggctgagagacgtgagaatgttcaatcttgaggaaaaaaggcagaggggacacatgataactgtttacagatgcgtaaagaggtgttatggagagaagagggacctatttttctcattagtcaacaaagacacttcaagaagtaatgggtttaaaacacgtggggggaaattcaggttaattattagattaagttaggtaaaatttaaatatttaaaatgttatgattccaagcataattaggctgtggagactaaatcacattagaattggcataggaaagtgagatgaaaacaaattcaatctgaatgcagagggttaattattgcaagtttatatttgcattaaatgttatcatatttcaaaatactttcacatatattgttttactgatctctggacattcttaggaaagagagagtgtatcagctagttttacagctgagaaaatggaatttcagagaggcaaaatgttgcttcgaacccccacactccagattagatagacaaaactgctaagtgcataggattagacaagcaggactaaaagccaactcttcacattttctgtcaatatgtttcacatggtaccttgctatcttttcatttgtaatatgatttctattgtggagaaatattgtttacatagaggaacaagaaacatgattgaacttatatctgcattacctatatctattatttatctctcactactcacaattgtgaaataaactcagcactttggtattatattttgacaaatcattgccaaacgtaatacaatctccagttggtatgatgtggtgagaccctaccttctaccattacctagaggtggagacacatttcatcttttatgaatttcatattcctcatctgtaggaagaaaattataatatcttctggtttcttctagttttacaataaggagtgaatgagaaaatacctgtagaagtacctgaacttgttcaaagaaataaacttgttcaaagcataaactttgcttggggggaaatgtgtgttgtttttggtgtactgtggattttgataatccctttccagttttattttcaatcctaccttttttttttttttcatttcctaatttcagattcctgaggtcaaggccaatgtctttgttgaagcacttaaaatttgctagtctaatgtaggtgttcagtaatagttggtgggtgactgagttaacaaatggatgaataaatactttcagttggatattatgtctgggatatgagcaagaggtgataaatgccatatataatcatcttgttatactcctttatgtaatgatgtatgtttaaagtattttatagaaacatggtatgccagattctcagttagatcctgagaatacaagccactcaaagtctaaaggggttttgcagaccactccaatgctaggtatagacaaaactcttcccagcaaagcaaggtagctgatgccaaaatgttaccaaggaaagacccattggttggttgccaagacccttatggagtctgagaagatgttttagactccctcaaccatgcacacaaattgtgtaaagtaatccaggaggcagcctaaatggaaaggctgttagtatgctgagcttgctaggaaatggaggaattttacggaaaatgtcagcctctgtagactcctgtgatgctcgctagggtgccagccttccccagggagcccacagcacctggcaggcagactgcagcagggagtctcactgggaggatacaaaagagcttaatggccccctgtgcataatgttgaaagaggctgcaatttttgttttcttcggagattaacgtgtgtgtattgcaggttcaaaatggtaagaatcttaattagagttgcaggaagttgcataatatactccatgtcttactttttccgcacaccaaataacagaatctatttgccaaattatgaaggttgatggagaatgaaaactgtaatttgagtaaatgggagccctgcccccattttttccagttagtcacaaagtttaaaatgcaaagaagtaaatctcccaagggagcaattctatttcatctgtggaagaaagacatatgttgttactgatgaaacctctgttgtgaaagcagagccaatgctgggaaaaacttgaaggaaaaactagctgagagccctctgtctcaggagcctgtggcctttgggtccacccagggctgcctgtgcctcttcctgaggcttttcttgaaggcctgctctttcctctgattaccttagggcaattgcctgcctctcttaagagaaaatgtacctgttttgtgccacatcccttcaggcccctgagctggacagtagattgatctgacagatgtcactttgatattaaatcaatagtaccaatatgtttctgggttttcctggccttagcaaggttttatgttcacttacttagagacattctggagaatatctcagaactcaaaacatgagatcaaattggagttctatgggagagaggatattgaattacttggctttattatggctgcactcatagggccagccacgtgtaaaagtttcattctctttttttgaacaaatatttattgaaaacaataaattaccaagaactgtgttaaaatatacagatgtctaagcagacacggcacaatctatggccctaagaagtctaggaggtacaatattttatataaattattcatcttcattcaaagttatttattgagcatctactatgtgccgtgcactgtgcatgcccctggaaagcataagagacaaaattcctttctttgtgggagctgtattctagtgaggttcagcaggtgaacagcaatccgtgttaattatttcttcttccactgaaatgaaaattctatgtttctaaaaaatattataaaagtactcttcaaacctcatattaagaaagtcaaattgtctttagccacatttgataaggattaaagataatcttactattttattttaaacatatttagagcagtccttgtctgaaggaagcttgtgttgaattttttataaagtgagttaattaccttctaattaattttgtgtgtgtgtagtgctcacctaacacaagattttcatgctgaatttgctcccccaaaagaaaaacaattcctatatatgttgtaaagggtcgcaagtcagaactgagatggaggcaatacaaatatataaccagcggcctcagacaagttcccaaaattgggaagaatgaagagatagggaatgactgcagagcctttttcaggaaagcatgagattggaagatgaatgctcaagtaaattagaactcaggaaaagtactgaacagcaggatcatatcatcaaaaatctggctgataggttttgaactcactgaactgaatctatttagaagtacattttgggaagactaaataaacatcaacactatggtctattctaattcaggctcttgctttgtctattttccaggtgataaaacactgattgttattagtgttatcatcaagcatattgagcagtcaatctgtaagttaatagcaatacacagccatatagtcctggaactagaaggaaagaaaatgaattttttcttttttttttttctttttttttctgtagaggggaagaaaaattcaacaccttgagtcagctgcgactcaagggtccattataacttcgagatttttaacagcctgtgcctagggtatgggagatgaattttgttccaaagtggtgacatgggcagatataaacccctgggagcaatttcaggcaagttgagagtccattctaaacaaaaatggacagaatgtggaagatggaattcccacacttgctttctgaccttggctgatattcctcagcagttggtaattagaggaaatactgaagctgagaggatgaaagaataaagaagagtagaataatcagaattgaaagaatgtaaataagtaataagatggggcaaaaacaggaatggtgtcactgacaaaggtggccacactttgcagtaagatgtgagtgggacatagaaactagatttggttgagtaagaggaaaaccatatatacacacacatatatatacacacacacacacacacacacacattaatatatgcatatttaaaaatatatacatttcaaaagctcatttatgttgaatactaagtgggaaattcatcagctgtttggcttcctgtctgttttattctttgccattgcagacttgagttgtcttcctgaaatctttctgggagataactgcatgcccagcccttttctttcatcagaaaaagggtattctgccctgagtcagaagcagggggaaaatagatgataatatctacatgttattgctagaacagagtcaaataaaaattaaaagtccatcaagtgatcaggttgaagtcaataaaaaggtcaataaaaagcaaggatgagccaaaaaagaggacttggtgtactggaaaatgccaggaaaaataaaagacagaaaaaacactgtggcaagatcttctcctgtggcctcagggaagtgcatgataaaattaattgaagcttatcacccatgaaaaagggctacagttggagcaatagctgcacggactacataacagtacaggttctttagcctaagacaaagataacagatttttgttttacttttgcaagcttttttaatatactgagttaaaactctctttttttgcctttattcaactgaatgctgcattttttgagcaatactaagtgttgattggcttacttgaacagcaatttgttaagaggcctgctgtgtaccggccattatcctaaataccagtgtacaaagattagtgatgtgtctatctgctttcaaaactcttataatctgtagcaacatgagattaatttttacatatggtttatatataacaatctaattccaatacaatcatatcattctccatatctcataagaaattgttttgggacattatttaaagaaaactttatacaataaatctataaattgttagtagatttgactcctcctttagatgaaagttttcatcttgtcgtttttttaaattcaaaatatgttattttaagttgatataaaacaatcatattagcaaaatgcatccacattgaaaacttagctggatgggtaaagatcgctctattaaactgtgatgtttaatactgagtgtcaacttgattggatttaaggatacaaagtactgatcctgggtgtgtctgtgagggtgttgccaaaggagattaatatttgagtcagtgggctgagaaagccagaccgacccttaatctgggtgggcacaatcaaatcagctgccggtttggctagaatataagcaggcagaaaaaggtgaaaagagagactggcctagcctcccagcctgcatctttctcctgggctggatgctttctgcccttgaatattggactccaagttcttcagttttgggacttggactggctctccttgctcctcggtctgcaggcggcctgttgggaaccctgtgatcatgagttaataaactcttttacatgatattctcatgatagtgaataaatttcatgagatctgatgggtttatcacgggtttctgcttttgcttcctcctcatttttcacttgctgccaccacgtaagaagtgcctttcacctcccaccatgattctgaggcctccccagccatgtagtactgtaagtccaattaaatctctttttattcccagttttgggtatgtctttatcagcagcgtgaaaacaaactaatacaggcactgttccatctccaaatggtcataatttatcagttcaaaggaacgtactttgcatgccaccaaagggttttctaagaattgggtcagcaattttaagtcaaggttgttggttctgagttgtacctttgagtcagtctttcagcattttagttctcaaatctagttttctactctttccaatggggttattcatccaatagacatgggaaaatcatcctaatcaaaacaaatttatgatcatttctctctggcatgactgcatcaggtagcttaaaccatagaagtttattgtctcacaattctgaaggctagaagttcgagaaaaagatatcagcaggattgatatcttctgaggggctgtgaggaagaatctgttccatggttcacccagcttctggtggtttgctggcaatctttgatgttccttttgcagtgtcaccccattctctgccttcgttgtcacatggcattttctttgcatgcacatctgtctcttcatatggtgtttcttttataaagacaccagtcatactacagtagggcctcaccctaccccattgtgacttcattttaatttattacatctgcaaaatccctatttccaaataaggtcatattctgaggtatgagtgggttggactacagcatatgaattttggggagacataattcaatccattataatcatactgcataactgacgagaaagtaaagaatcaatctgatgcaggaaagataacctaatcaaaaagaggaattaaacaactccaactaattccttacatttaatctatttaatataaaattataattttgcaaacacagcatggtgcactatggtaactaaagcaattggatgatatttcaaaagctttaataactagtatttaatcacagatgctgtgtgtttttacctgaaattcatcctggtaatgcaacataattaattgcacaatttattttagcatgagttttcttatatttatagagatagcatagcaatcttgttttcaaatttccctcagaatgcttgagatcagacattattagcatggagacaatagtttcattgtcaactcctgctggtttgggtacatttacagtaataaccacaatccactagcttgaattattgttcaacattctatgtgacttcatgagggtattaatatgcaagagagttatttgatactaatcaaagatacacatttgtcttcacacttattacaatatggtaaggtaatcacataaaatacttaagatggtagacttcatacatatatatatatatacttttaatgaatatactaaagctaaccgttaatggaagctttgacagaaactcattgttcaatatccaagcaaatcaattttggactataaatgcagaattctaacaagcaaaaattctaatcattcattttatttttctgttattcgtggcttcttatattgttaaggcttaacatattaagatgcacataggatttaatcttcatgagagagcaatgaatacatcattgaatacataccaatcatgtgtaattgttttcatatgtatgtaagcccagcggaaaagagtcgttcattgacagtactcattttcccatttggtgtattttcctaattgtacagtataacagttatagtaaatggttataaatattaccctttagctgtaacatctatgacatttttgttgatcatgataatatgtgattgtttagtcaactgagtttattgtaattgagattggaaatcactataagagtgaaattgaatatatagatagagaaataggataagttaatatggcagctcaacactgaacacagactacaacttcttgaccaccgaaatatgcaaaatattatataatagcttgtatctggacagcgtgctaagctgttcacttgttctttatcatttaatcctcttttcaaatatgtgagatatgttctgagaagataagcaccttgttgagtcatacaggtaatacattttaaaggaggaatttatatacacttaagattgtgtgtgtgtgtgtgtgtgtgtgtatgtgtgtgtgtgagagagagagagagagagagagagagagagagtttcaggctccaagacagatattaatggtagactgcctttgttgcataactgtagcagtggtgtacaactgctactcccatcttctcagtacttcatctctttctttgaatcaactacagctattctgatggctagattatgatctgccagtttgagaatccaactcttgctggccagagacttacagttaaaaaataaatcatttagagtcatatgcttatgtactactgggctgtgatcctcaccctaaagctcactttggcatagctctttacttgccatcgattcttgacagccttatttcagaattcttacagacacagtgtctatttaattttaatacaatcaagcaatggtttctggacatatttggctatttctttgaaaacaatggaatctgtcttatgggcaaaatgacttttttctgccctaaatgctgacactgaattgcgttcaatcatgacagaatttgtgcaatatgaaaagtttgtccactgggtggacaatttctatctagcatttttctctccttcagggatggactttaagttgatttgacaaaattggtttcatatgaacccaaatgcaaaccctatattatctttaaacactggtttctgtgaagttgtttgattaaactaatactgttgactccctgttttctgttttatttctttaagatgacatcccttattctgttctgctacctgggacattgctcttctctccatattaattaattaatattgtttcctaaatctgtcttcctagtctctgtgtttgtcttcaccatgtgtattgggatatattctcgaagggtttcatgtgtgaattccctcttgagtcaaattgtacatgtaatttcccttcattttaaaaataaataagaaatatgagaagaattttcaaaacttttatgttctatatgctttcctctggtttggaaattaatctctgaatttatttatattttaggtattgcaatttgagaattagaagagttgtttttacaaaacacagaaaacagcttttgttttaattatttttcccagtgtgtctaagagtcaaaaagactctgtattagtattcactggcaaacagaacacaatgcagagcagatatcctagaagcaacatgatagatccaatcatccgattcattatagtacaaatattgtaatcaatcataatattcagtgttccataaatccacaattctgtgaaagggataagaaaaaagaaattaagctatcagtgagtttactaaaaaaggaaaagagatttcctgattatcatcattcagaattagtcagacatatacatggtaatcattcatattttaagcaataaaaggaaactcaacacaaagcctggaaagcaacagccttttatttttattttctctaagatgtgaaaaaatagacctaggtgctaatttaattcccttttaagttaatgacataatgggtttgtggagcattaaatagggaataaatatggccttacatttccatgtcggagctaaatgctttctcttccctcagcttctaattcctcagctgagggaagtgatcagcagtcaacgatcacaatgagggagctacgcacacatcctctggtttcctgagctttggaacacttaatgcttagtgcagcttctctattttgagttctaccatgaacccctctctgatgactcccacatatgtcttttttatgtaagcacaccaagttcagctatccctgtaggtagacagcatttgagacttctcagttgggtatgatttgagaagataatggagctgatcctcttgacataaactagcctattggtcctgcccaaactggtgttccctggaacagaggcctaaaaacaaaatatatttaaaatgttcaaatatatttagaaaatattgtgttaaatcaagttagccagatttttgttgctttcattgtcatttttgttaatattgttgcatgatttccagaatattcagtatgcaaataaatattcattatgaatttaacaaaataggtattttctaaacttctttgaccttggaactcttgttctcccttcccaaccccaccattgcacttattttaacattgcactcagcagggctatacgcatcaacattttgggaatttgaggatgaagatatgtttttcctattaaaaatgaattcttatcccactgggaaagaaaacacattaagcttttatcagtctttaacattttaacatggattagccattctgctctttctggattataagcagctgagagcaggctttcattatagggagagggaaagatgatctgaagtgtcatgtgtccccagagaggattttcaagtggaatgccaccatgagagttcctgggctagcagaggacaacttcatatagtgcagggttgcagcaaggccactgacaccagctgtatatagaaagttatgtttgcctcagtttcttcagccaaaacagaggaaatttactagatagtagctatctccctcttagctctaacaatacaatctgattatcttgatggctaagtgtgggaactgagagagttagaagagtgggggtcactagttgaaaaagcaaggttagaaatgaatgttttctcagtcatggctggcctagggctggctctgcaggagttcatgattctcatctccccaaacaacaaagagccatggaaaattcatcagataacagtaattcaacagataacagtataaagactatacatatttttaagatagatttaaaaaatgcatgacatatttctggcctccaatgagtgttcagtatgaaaaaataccaactagatgaataagtataggcaagcaaaagattctaagtataagaaagtgtgaaaagtaaaatttattttatttttctttgaaagagcagtcttcccaggtcaagagattagaaagacaagtaaggtaatgcctcttctctgaagtttagaacagatgaaagtgacacataaaagcagaataagataaatattatatcatagtaaaaggaatgagaggttgtatgtagagtggttgtggacttggactcaagagcatgtggacacaaatttctaggttaaattccctggattcagaacccatttctaccatcttactaggtctgtgtcctcttgtgtaaatggtagtggtgatgataattaccatgcctttctgctagaactattattaggaggattaaagaaaattaatatgtataaagcatctagaagagtgcctcacataaaataacaaacataagtatttactatcattaataataaattatatccaactagaatcattataaggggttttagaaaagaagtagcaataagataataagtgaagaatgagtaaatttttgaagctacaaatggattgaacatagtactctagggagagggacaatcatgaatgaatacatcaagatgaaaagtcaaagggtaaattttagaaatagcaaatagattggtttgctaatataacatactggccctttactgatcatgttgatcattttgtgagaaaacagtaggaaatgacttcagaaagaatatagtttggtaaaaaccattttaactgtaggagaatgaaactggattctcatctctcaccttatacaaatatcaactcaagatggatcaaggacttaaatcaaagatctgaactaaaaattctagaagataacattggaaaaacccttctaggcattggtttaggcaaggatttcatgaccaagagctcagaagcaaatgcagtaaaaacaaagataaatagatggaacttaaccaaactaaagagcttttgcacagcaaaaggaatagccagcagaacaaacagaaaacccacagagtgggataaaatcttcaaaatctatccatctgacaaaggactaatatccagaacctacaacaaagtcaaacaaattagcaagaaaaaaatgaacaatcccatcaaaaagtgggctaaggacataaatagacagatctcaaaagaggatatacagtggccaacagacatattaaaaacatgctcaacatcgctaatgatagagaaatgcaaatcaaaaccacgacacagtaccaccttactcctgcaagaatggccataatcaaaaaaataaaaaaataatagatgttgaagtcgatgaggtgaacagggagcatttcttcaccgctagtgagaatgtaaactagtacaaccactatggaaaacagtgtggagattccttacagaactaaaactaccattagatccaggaatctcactcctgggcatctacccagaggaaaagaagttattatatgaaaaagatacttgcacacacatgtttatagcggcacaaatcacaattgcaaaaatatggaatcaacccaaatgcccttcaatcaatgtgtggaaaaagaaaccactgtatatatatatacgtgatatatattgcatatatatatgtgtgtatatgtatagtatagatatatgtatatatatagtatatatacacatgatatataatgtgtattatatattatatattatatataatatatataaatatatattttatatatataaatatatatgatggaatactactcagccatacaaaggaattagttaatagcattcacagtgacctggatgagattggagattattatcctaagtgaagcaactcaggaatggaaaaccaaacatcatatatgctcactcaaaagtgggagctaagttatgataatgcaaaggcataagaataacacaatggactttggtgactcagggggaaagggtgggaaggcagtgagggataaaagactacaaatagggtacagtttatactgcttgggtgatgggtgcaccaaaatttcacaaatcaccactaaagaacttactcatgtaaccaaacaccacctgtgcccagtaacccgtggaaataaaaaataaaagaaatttttgcccaaaccaatgtcctggagtgtttctccagtgttttcttctagtagtttcatactttctggtcttacatttgagtctttaacctatttaaatttgatttttgtttatggcaagagatagcattctagttttattcttctgcatatgtatatccagttttcccagcatcatttattaatgagactgtattctccctaaggtatgttgttcacacttttgtcaaaactgcattggctgtaaatatgcagatttatttctgggttctttattctgttcttttggtctatgtgtctgtttttatgccagtaccatgttgttttggttactatagctgtgtagtataatttgaagtcaggtaatgtgatgcttccagctttgttattttttgctcaggatgtcttggactgttctaggtctttcgtggttccatatacattttaggattttttttcgatttttataaagaacttcattagtatttcgatagggattgcattgaatctataaattactttgggtagtatggacattttagcagttactgattcttttaatacatgaacatagaaaatgtttttatttttcatatctttttcaatttctttcatcaatgttgtattgtttttattttagagatttttcacttctttagtttattccaggtattttattttatttgtggcgattacaaatgggattactttaattatttctttttcagattgtttgctgttagcatacagaaatgctactgatttgagggaaactcttctacactgttggtgggaatgcaaattagtatagccgctacgaagaacagtgcagaagttccttaaaaaagcaaaaacagaatggccatatgacccagcaatcccactgctgggtatttatccaaaagaaaaacatcagtatatcaaagagatatttacactctcatgtttatttcaacactagtcataatagccaagatatggagtcaaactaagtgtccatcaatggatgaatgaataaagaaaatgtggtacatattcatgatgaaatattcagccattaaaaaagaataaaatccagtcgtttgcagcagcttggatagaactgaaggacattatgttaagtgaaataagctaggcacagaaagacacatattgcatgttctccctcataggtgagaactaaaaaaattgatctcatggagacagagagtataatgatagttatcagagcctggggaaggaaatggggagggggataaagaagtgttcggtaatgggtaatgggaacggaagtacaattagatagaaggaataggatctaatgtttggtaacaaaatagtgtgactataattaacaataatttattgtatatttgaaaataactagaagagtggaattggagtgttcccaacacaaagaaatgatgcttgcttggggtgatgcatatcccaattatcctgatttgatcattatacattgtatgcatttgtcaaaatttcacgtgtggcccataaatatctacaactattaagtaaccatgaaaattaaaaattttacaatttaagaaaagttaacttgacgagaaaaagaatacagtttggaagtcttcgaggatagataggaagagattttccatttaatttggttttaaatgggatcttgtctatgtttgctcagggtaatcatatgaaaggcattataatttgaaagcttaatctcaaaatagtactttttttggtaaccagttgtcttgcagcaaaaacaaaagcactgaacttgggtcaaaatacgtgaattcaaatccatactttataccttcagaatcaaacactctaagcctcattgcgttactctttaaaataaggaaagtgcatctaaattacacattgtttttagtagcaaataagttagatgaaaaagcatcaaatgtaatgttgggcatacataaattttcaatcaacttttaactatataatattatctgaacaagacaagtgaagaatacaattgtaattttttaaattgcaaggcaacagtttctaccctaataatatctacattttcctcataaaagtcagtgcatcagattctatacagtatgctcttcaaattcttggctccaaagttagcaaattaaacatcccatctcatttctagtttgcagtgaaattctcaaaaagtttccagaatccctgatgttactcatcctgagctacatctgacttctaatcagcatcttttacttagaatacagatagcaaatctggttggcagttattttccaatgattcttctgccatactgatgctttataatggctccaaggaaaggccattctacaaataaaagcaaaattaataaaagaatgcgggataattgacagttttgctacaacagcatttaatttgaatcctttgaaacttactcttcactcattgatttttaggctcacaaattctttgtgtgaattctctcttttacttttgcattgtgaaatgatttatcatttgggtaattttccagaattacactttattattttgtaaatggcatgcagcacagatggatattagcaaggtctctgtataaacgccagcaatagaggtggtaacattgccctgagagttttctcctgaaacaaatcaaataaagaagagaaagcattgccaaagctggccatgacagaggaagtggatccaataatagacatctcgatggatacatatatatgattcaatattgtgtgacctttactttcaaactcactttcagaaaatatattctaaaggggtgccaaggatattgctgtctactctctactgacttccatgaaaggaaacaccattcctctgtatctcagtcatcaatgagtacatttatgaaagagtttggccattgtcaattctaatgccgttaagaagaacttgagcatagcttacatttttttcctcattttactcctacttgtatattgctttggcatatactattagtgcaatgctgtgacttccaaaacttctcagaaagtaacaacttggactgttaagagactccagcatttgaaatatattttaatgcaaactgtctccctgaagacctctatccatagctaagatagttgtatccgaaagctttgcgcttacttctttgcagtgctatttgtaaacattggcatagtaagagtgataaatttctatggaatcatctttatcaaacatacattatagaagtagaacttattccagctaaccacattatcatgaatagcattttccatatttctttgaaacaatacaatagaaacaatattatcttaaacattaagtatccccattgattggtccagtgaaatactgcttggaatgaaggcttcaactttaaatctatttaatcaaatttggtaaaacaatcatggatcaaatatattattaatgttacgtggcttttattattattattattattgcaaaaattaggagccttggtttttgtggccttattctatttcagttagatataatatctcctggccttgggtgctttttacatacaaatggggtaaaatagttattataaagaatagagattgaatagatgtgcttagagtaatgtctgacacaaagcaagcactcggcccagcacagtggctcatgcctgtaatcccagcactttgggaggccaaggcaggcagatcacgaggtcaggagttcaagaccagcctggccagcatggtgaaatgctgtctctactaaaaatacaaaaaattagccaggcatagtgccatgcacctgtaatcccagttacccgggaggctgatacaggaaaattgcttgaacttgggaggtggaggtagcactgagctgagatcccgccattgcactccaacctgggtgacagagcaagacctcatctcaaaaaaaacaaaaacaaaacaacaacaacaaaaaaagcaacggctgttaattgccaggaagaagagctcctacaattgtttcatgtgcatttaggcactctcttccatgtgagaccccaagcagtcagcaggactatcaaaggaacccttttaagacttagatatctatttttaattcttgcactgcatttctactttgataaggggaaaaggcattaaaacacatttttgaaatgtaaatttccaaagttacaaaaattaacccaacacatcatatgctctttgaatcacttaaattggcagctgtcttataatgataaaagacctacggcgttcttagatgatgtctacatgatgccagacagctaattgaattaaggaattaaggaagatatcaactagtccttccccttatttgccagatgaagaaatggaggccaagaaatgtgtagtgatttatttacatcaggggttgagtctgttggtcgtgagaacttctagcctagttattttttccaccccatctatctgtcctgaaatttggtttcttattgctgcagcattgaagagatggaaccactaaaaaaatactgataaaaagatgtttatccagaggcaactttaatggcaactcaaactatttgaaatatgatggaaaatttgttactgagtgaaaaggccatcgcacaatcaaaattgatgtttaaagctcgcctactaactcttccacactatccaatgtagtggtcctccttcattttgctctttagagtttccctaattttctttatgcatgcatctgatttcatcttactttagagaaaatactaacagtgtatgtctagaacatggcagattggagccttatagcacgagaggcagggaaaagacagctaatagcgattcactgataggagaagaaggggtcccatattgtttgagttttagataacgtttaatgatcttcctggataacagattctatgaggattttttttttttgcttgtttaaataaaagctgattcaatgataacaaaaggagagacagtaacttcagaaaaatatagatatgctaattcttacatttgtagagcccttttgatattaaggttcaagatctaaaaatgtaattctcattcaagaccgtataaaaattgttagttctatataagcatattgaatcactgatagattaaagcacattcatcatactctagaaaacaaggaaatgtgtaatatatttgatgtcatttttattacaattgttaaaatagtgaagaataaacctgttaactagaaatctatgcatgcagaatgtcttattacctaaataacaccagataaatgaggtgttactgtccacagtctcacaacagagacatgaaaaacccttctttacactggtaacccttaattaaactgaatttttggtgtgtcccttcaggagaaggtcaccatatcagcaataattaggggaaatggcattgtgaacattactggatgagatgtggtgtatttcttactttcaattattgcctccttgtttgaatcattagcatttggcagatttgttgctgaatttgttgttctgatttaaaactcggtgtaaggttgaatatgttcttatcttgatcttatatttctgccatgacttgcatttcttgctgagtttctgacttgaattgctctatgtttttgctgagcttttgctttgtcttgttgtatttctatctggaggggtttccctccgcctttttctttttgttatatctcttctttggcctattgtatttctctggcccattcattagctttttttttcctttaaagttattctcttgttcagtatatgcagtacctaatcaatacgcttccttgcttgctgcaggatttccaacttactgtgttttctgtcagctttgatactgcctgagaggggtttctgtgctttggctaatatattgttgtctgaattcgcagtgttttcagctcattacactgactttaattttgatgtatttgtattttatccagttcaagtcatgtttctttcctctgtcaatttaattactttctgcctgggcaacattgtgtttatacaattgctgctaaagcgacaaaaggtttctatttaaattaccacccagagcatcagcaattcagcctaaaaaatatgcagaactcctctgattgatgtcttacctttctgtggataaggaaatctagtctattgagaggatcttctttatagaacatagtcaagcctggtttatagctgtagagtcattaacagaggagatgagtgtagggctatggggtcactgtatgacttctctgtaagaaaaaaatgtatgactaggttctattcagtacaagtcatgtcctaacagcaggaaaaagaaaactttcttaggtgtttaacttatatttaggtgggctacccaagctccagctcttatttttctatgtgttatatatattatacacatttctgggtttgaatcttgttctttctaataattttgcattgggctgtgtaagtcaggaacattgaatttccattgtgtacataaaactatagcaactggtctaaaaacaaataatgtgggaaacatagtaactgttcctgttttcaaaggcttacaataatgcgaaaaaaagggaaaagcttatgagcaatacatctttgaaaacagaaacagtgaaaacactccagtaaatacataattggttattaatagaattttaaattggagaggcataacaattgcaacagctcttggaaatgcttaggaaactgaggcttataggtttacccgaacatatgtcatagataacattaatcaactagctgatgaacatgaccagcaaatgcattgattgcctgatcagcaaatgcttcaactgttttgttttacaagacttaatatgtttaaacaacaacttactctttacctactttttaaaaatatccttctgtattttctgcaacaaaccattgttgagtccctgtgcttaacaaaactgtgcaactgtgctatttacccagaggaagaagaaagatttttttaagtcagttcttttctggtaagtgtaacttttctagtattggataatctttctgagcctcagttttcttatctgtataattggcataaatgaaccatgagaaacaaataaaatgacatattcagctcagtgtgtgtcacatggtgagagacccattaagtttgctcttttccttttgcctttctcttttcagtgttcagtcattatactgtcaaataaattggagtttctggcttttctcacactcaagattattatgatatactacactagtacatctgaccttgataaaaagcaattttctatagtttaattgtatagcaataggatgggaaagtctctgattctcactctgtagcttcttcttcccagggctggagtcatttaatctctacctttaggctcattctaccctggtcccttgggtcatgaattcatctggaagattcagacttatgctttaaggctctcagaaactcaatcttgcagaagaatctggcctccattttgtacacactttgttcaaagagcctcctagcaccttcccaagacccacatataccactcccattttctctcttggttctggtgattgactctctttatgttcttggaaagctgcctagtatcctaaaaccagtattgctgcctggctgttaccaggctgcaccctcgactaaagttgatcccctgcactcatctttggactctagatttctattacatgcacatcccttgtgccaaattatgctggcttgtctggccttccaagtttcacctattgttatgcttatttgtcagttcaagtctctattccagctctatcccacttccttctttctttagcctgtgtccctctcttggatccctgaaacattttgagtactagctactcctatgtcctgcccatgtgattaagaatgatacttttctcccgtgcttgcagctgggtagtcatactccatacccacccaggtaaaaatgtctggatccaaatctacctttcataacagatctgatgtgctattctagacagctttactccatgatatattgcagactttatgtaggttaacaaagcattatggtgtcattcttgtgacagccctacattttcattatgatttttgtgtttgcggtcctttttgtgacaatttcttttagatgaaaatgcttttaatgaagcccttttggtacttgggagcctcactggaatggatttagtacaaacttgccttatttcaaatttatgttcaatattgaacaacactgttacccatatttaggacagtagacaggtaaaggttgcagaatttttatgaaatataaagcaatatccactgttataatgaagcactacataaaattgtataatacgtgagtttcttattcctcaaatagtctaactgattgttcattgggctcactcagccaaaagtagagggaaactttgtacagacatcattagtttttctccatttagagattaatcatgaagagctctggctctttaattctgtaatttgtatatttaatgggctgctgcagaatctatgacagtaattagcatagcctgaaaactcattaatacgcaacaacatgattaatgcagcattaatgcaaacatgactgaagttatttgggttatgtagtaagaagattaaagctaaaatgtcctgtttgttttaccagtggtgagtataatagagtggcaaaaaaataaaataaaaacaggtatcaaattagctgtttaaaaaaaagaaaaaaaccagcaaaatttaaatcaaggtgattttatttttcccttaggtctaaaatttgggatataagttatgttctttacttttatatttattcatttattcataaatttatcattactgaaggaaagttcattcaaccttttagtttaacatagttaaccttttagcagctttaacataatattattagtcttacattggaaacaattttaaattgtactaatctttgaccaatacattacacatttctgttttgaaactaatatatattattggctatgccaaataattaaaggatttgttcctacttattcagaagttacatattatgccctcttctcactgtgttcacctcttaaataaatgttcaaatactttataaaatactaccataaaactcatttttttaaacaaaactatcaaatatgacatgttaaatactgaaataatcaataatgtttggggatgtaaaagtatataagttttgcttgttcttgctgtctcatgtaatcatattgaagtcctctcattcttacttttttttggcttttcttttttgagacggagtctcactgtgtcgcccagactgcagtgcagtggcgccatctcggctcactgcaatctccacctcccgggttcaagcgattctcctgctcagcttcctgagtagttgggactacaggtgcccgccaccatgcccggctaatttttgtatttttagtggagacgaggccgggtgcggtggctcgcccttgtggtcctagcactttgggaggccgaggcgggtggatcatgaggtcaggagttcgagaccagcctggccaagatggtgaaaccccgtctctgctaacaatgcaagagattagctgggcgctgtggcgggagcctgtagtcccagctactcgggaggctgaggcaggagaatggcgtgaacccgggaggcggagcttgcagtgagctgagatcgcgccattgcactccagcctgggtgacagagcgagactccatcgctaaataaataaataaatacataaataatacagacggggtttcaccgtgttggccaggctggcctcaatctcctgacctcagatgatccatccaccttggcctcccaaagtgatgggattacaggcgtgagccacagtgcccagccattttttttttttttttttttttttttttttttgctatttagtatgacctgttttaatagcggtcctaaactttaaatgacttatttttcaatcttatagtcaaatgtcaagagtcattaatagtatctcaaacaaaacttgcattttaaggttaagcaatcctggatgactgaaaaaaatatgtatctgcttttttgtacttattttattctaaatccacattagaaaaatgtttatgattttattctttttcaataaaaaaaaacaagtgaatatccacgaagtacctgactcttggctaggtgttgaggaggaaaagcaaacccatcaatgtctgtgcacttggaaataaccatctgggagaagagaagctcctttcaacctagggatgtctatagataagaatgaaattgcaccatagaaagaaagcatatcaacattgcctgctaccaacagatggcactgttaatggtttgtatcacaactgtatttgtgggaccaatagatttgctaacattctcagaaggtagtctggaaggagaagagcctctgttaaggcagtgaaatgatatacatgctcaattttgtttaattatcttgtcaaaattcctggaaaaaaataaaaaaatatatttatatgggatatttcgtttaattaaaatacatcatcttttaccaaaattaatatatgtgaaattaaattgtagtagaactttaaaacaacatagagttcctattgctttgaataattggtctttacatttagtattatattatatgttatattgttatgtataccatatatataatgttatattatatactgtaatattagagtagcaactgatactcacaaagctaaacaactcagttccactgaaatataccagattttgacttagttttaaaagggaggacctagaaacagagagaaaatgcatcagtgggtaaaatcatttacctctaatgttttatttcacctctatggtttttagtgtactagagagctgtttaatcagaccattaccaaattgaataaatggctacttagtgattactgaactatttagtgatggggttggggagaactccttttttaaaaataagccttttgaatagttcatataagaccatcctaataaataaaatggaacagaatgtgtttgccatgtaatagcttagtgatttttaatttctgtattgtgatgaaacaaccagcttttctagaatgtagccagtcctttgtttctcagaagctgtgcacacttgcggcattcagtcctagtgctgccataacagagtttctaaacactagttcagaaatgagacatttttgtttagtctctgtttgggcacagccaagagtttaagactgtacatggagagaaacttgcttttttctgtggatgtaatccaggggacctgttgaggtctttaatgggtggctgacaggatgaactgggcattcaatattaaagggtggtatcatagcaagggggttaccccagcagagtttgtagatcaggaattgtttagagcctagatcttgggaaagtgaacaagaagcatgttaactaaagataaaaaacagaaaccaggtattgtctttttaaactctgagctcttggagtggcgatcatgtcttttccatattagtatctccagtgatgagcattgtctgttggagacactcaatatacatttcttgaatagagtaaggatttactggactttgacacagaactaaggttctgtgtgatagaggtctgtgtgcttatgagaagctggactgtgtaggtgaggatgctaaggctcctgttcccatagagaagtccttgagatggctcaagctgctggttcccttttttcttggactttgcaggtattcaaggtgtctctagttagaagctttatgttttgtaatgggtaaaaatagtgctaaaatatatagctctttgctatttataccaaattgagggtctctcagaacaaatacagtggacggattttaataataatagctaatacttatatagggccaaatagttctgagtacttttcatgtatttaactcatttaatcctcccaaaagacttgtgaaagaagaaactctcgttgcccacttctagaggaggatattaggtgtagaaaagttaaacgatttgtccaaagttacatataaattaagtgcagaagctagtttttgaaagcttggctctagcatttgttttttaatcattaagccaaacatcaaattccccttcccacactttttttttcacttttaccaaagaaatatcttaacaaaatgactcctttggaggaggaatacatgcatatatatatctgtgtatacatgcatatatatatctatatatgtgtatacatgcatatatatatctgtgtgtgtatatatatatctgtgtatatatatatacatatatatatgtgtgtctgtgtgtgtatgtgtgtctgtgtttctgtgtgtatatgaggtcagagtgagggccaagaagctattttttctctaaagtggttcatatattgcaagtgatttaattgagggaagatatagttgtattagctaaaacacttaaaagtttataaataggtgtgtctacacaaaggcaaacattcctctaatttctaaacagtttttacttctattgaattgaatatgcctaatattttagtgtcctgatgattaaagtatgaggaatgaattaataaccaggttcaaatatgtgtattgttaccatgcagatctgttaatacttattaattcccacatcagtgtgaactaaggaaaatgaaattaagttgcattaagaatgtgctcagttatatataaagatttacttcctgtaagagtgattatataattatatggtttactaaaatagttatgagattttattctttcattcatttgacatgcattattggaatcttagtattttcaaactacgtatttggagataaatattgcagtctgaccataatgatagtttaggtattccttggcctggaaggaggacactagttcattttattaacatgttctttgtctgtggagagcctccacaatgccattttagtaaaatactggatctttactaaaccatggctaccaaagacaaagtgtcattctaggcagccaacagacttcttgccctactcctgacaagcaaaataaaatagcctggggtaagagaggtaatggccatgagttaagtcattttcatagttatgctaaatcagcttccctcaggagcacccccttcctttcctttctctgtttaaatgaggtggagtatgatgtgactattccagcacactcaaaattagatgtgtgatcaagtattgatcttcaggaagttcctaatcctgtctgatgttttctgtgttagctttttttttccttctgtcataatgttagattagccagcaccttcattttgttattcccttactttttaaggcaggattcttctgtacaagaaccctgaagcgaccctaatattgtatccaaaatgtagggtcagaatcaggagtggagactgtgagttcattgtgagttaacagtctattatttaaaagtgcaacaagaaaaatagttttgctttcattccatttctgggactctaattttttccaagggagtctggcataaagtatcgtattggtccaattgcttgggatccactgagattgttactagagagggctttggtgtaaaaccccagagtaaaattctttaatgtccttttgggtcattgaacactttctaccattatgcttgacatggacaccattgaaatcattccaaggtcaaggtcactcagcaattttactaatgcttcaagttagtggaattttatttttccccccataatgcttgttttacaaaataaaatacagtatattttagtagatattgtaagatcaatttttgaaatttcttttatcaaaataaatataaattttatgaagtatctgtatgtttattatatgtaaacgtgcaattacaaatatgaaatataatttatatacatgtatctatgcatgcacctggatcttatttgaggtataaaacatgaaactagaactaatgtgttttacaaatatacgtaaaaagttattatttttttaattttatagaaacacagagtaagtaatgataaaaattcatttgtattaaaaatatttttataactacaattagtactaacattttgctttagcctaagcttaaatgctttatttgctagagtcacttgttaaaatactaaaaattttacaaggtatgaaggtaaaatagaaattatttcaaaaaaacaaaaatgcatgctgaattttctcttttcctttataaaacaagcaagtcctttatgtagatttctacaattcataattcaatgtcattaaatggcattcaatttatattttagactattatgatttcaatttgagacacaattgttttccaaatgaattcaatgtggggtatatttatgtaatagatgaaatgtatttcatctattttggaattgaataaattcaatttattcaattgtttggaattgaataaatacagtacgtataaagggaggatgaaaatgtacaactattggatgttgatagaagcattctgaataagaagcatttttacaataaactcaagtatatttttataatgtactttttaataatacactgattttaaaagtcttttttataatgtactttcatatattttttcttgagaaatcttgatcttgtattgacaattgcataaatatatttgtgcccagcacaatggcttacgcctgtaatcctagcactttgggaagctgaagagggagaattgcttagtccaggagttctagaccagcctgggcactgtggtgagaccctgtttctacaaaaaagtcttttaaaaattagctgggtgtgatggcacatgcttgtagtcccagctactcaggaggctgaggtgggagaattgctgaggattgtttgagttcaggaggtcaatgatgcagtgagctatgatcacgccactacactcaagccttacaacagagaaagaccttgtctcaaacaaaacaaaacaaaacaaaacaaaacaaaacaaaaataaataaatatcttggtatgtaagggcaatttggggttgataatttggagagggatggaaagatacatagatgcctatatctacatagatagagctctctctatacatacggatacagatataaatagatatctatatgcagatagatatatatctatgaaaatacacatctaaataaccatagatatctattaatatctatgtatctgtatctatctatacattttaacttaaaactttatatacacataagcctatagttctatatttgtagctaagtttaaaaagctattcaagggaagccctgagttgttcttttatggcatctggtggcatttcatatttgacgtgttggttgctattggtgtttgcactggtgaatccttccactggaaatttcatttcttcagggtttaccaatcacctaaaatgttttctttctggataatatcccctgactgctttcttcctcttttagcctaaagtttcctaaaaatttaaaatgcattgtagtcagctttacttacctttcacagaatagcaactcaagaagtgtatgctaagaggaggaataaaattatgtaaaaaatgaactagaaacatagttacctaagacaaaaataataagtggacaaaccaagagtaaacattttacttaagggtttaaaaatgatatcaatttttactagttagggacaatgaataatgcttatcacctccactgttatttagtgttgttctggatgatataacccatgtgtaatgacagaaaaaagaattatggctgttgaaaaggaatagatgaaatttccagaaaataagtttatacctaaaaaagccatcaaaacctattataaataacagaagtacaataagatggttagctataaataaatacataaaaataaatattttttccataattcagcaataacaaatctgaaaatgatctgattcttaatatcaattaaatatataataagtactatagcttaacaagaaatgtgcaggatctatttaaggaaaagagaaaagaagaacttataataatcattttaatacaaaagagtgaattagttgataggtagctaaaagcagaattttaaaaatttactaaaaaaagcaattttgtaagtaaatttgtaagtaagaaagaaaactggaatatatccctatctcactttacatgtcaaaataaattacaaattttatatttaatactttattttttccagaaaattaaatataaaaatacagaaaatgaacagaaaaaatataagtaagttacaaattctgggctaggaagcccaattataaaaagcaaaggaagacgccattattgaaaacatttagattttaaaacaaaaataaaccccctttttacatttaaaaataacatttaaaagtcaattgttaaaaaaaagtaaatgactttaacaagtgacagacaaagaaaccatacccttaatgtggaaaaaacgcttacagatcaataataaggatgcacaaatgacaaaaaagtatccaaatgaagaactacgatgaaagttcaaaatcactattcatcttgtaaatacaaattaaaactagaataagatttcattttaaatctatcgaatactagttggcgtctttcagaaatgccaggccaaactattcctgatgctagaaatgttttgcctgacagtggctgaaaactatttataacatatggaaaggaaattacacaacttgagaaatttcttgcagtgaactcagaaatgaaaaggcggttagatgacaatttcagttcattaatttataaattcacatgctaccacagattttagagatcatgcaattcagtatctccatttaagagtaggaatctatgggctattctgctcaggaaatcagcactatagcatgtatatgtatttcataaagtatctggtggatattactttcttgttttgtttttttttttttttttttatcatttggaggttgtaaagcatgatcagtccttataagggtcacatttagacagctacagattttaatcgttccaaggaaggaatgggggattatttcaaaagacgaaagaaaacattctttgatctaaaagcagaaccaccatttgacccagcaatcccattactgggtatatacccagaagaatataaatcattctaccctaaggacacatgctcgcgggtgttcattgcagcactatttacaatagcaaagacatagaatcaacctaaatgcccatcaatgacagactagataaagaaaatgtggtacatatacagcatgagataccatgcaaacatgaaaaaaaacaagatcatgtcttttgcaggaacatagagctggaggccattaccgttagcaaactaatgcaggaacagaaatctaaatactgcacattctcacttataagtgggagttaaataatgagaactcatgaacacaaaggaacaacagacactggggtctatctgagggtgaagggaggcagaagggagaggagcagaaaagataattattgggtattaggcttaattcttgtataatgaaatcatctgttcattgaacccccgtgacacaaattcatgtatgtaacaaaccttcacatgtaccccacaacctaaaataaaagtttttataaaacacatttctttgttttatacagaccagaatgaaatcatttctcaacacttcttttacattaaagcacattattcttgtttttttcctcaggtattgccctactttttaatcctaatctatagttccattgtaatttttagaatgctaatctaatatttattgaattcttttgtagtaagcaactgaaaaaaatttaattttcaaaaggaagaaaaaatacatgtttaaataataagataacacaactttggtattctaaggaatgtttggggattcattccagggcgctcatattttcaggttagctttcaactgttattttgtcgagtataatcaatggagattttgttattcatgtatttatagagctggttagccataaatagtttatgaatggagacatttctagcaccacctaatggcagtcaagtaaaaagaaaaagtttttctaatttaggaactgttttgcataatttaaattaaactatatagccagagttacttccatatgaaaatgaacttttacattccctaatgcactaactaggcatggaaatccatctctgagcaattggattgagtaggaatgaagctgaagggatatttgataatgaaaccaaggggtttctgctgtctttatgtgtgcaagaataagaaaatacctagctaatagaataaattaattttatgtgaaaattttctttttagtttcagaagcctatgcatactagattttccatactgtagtttcctgaaaaaagtatattttgagtattgtattggcatattttatttgtcttgtttttcagcagttatttatacatctttgaccaatttattctactagtttaataaagcgttttttaaagtttctgatagtttttttaaactgagtcatatcattctgattataatattggaattttctgttgaatatgagtcaaagaacatgctttagatccgtaagctctactcatttatttcatgtgtttcctagcaggatttgaagaatgtgttgtctgtcataaccctaggattgagatcaatggatttggttaatgtatccgaaggagaaggagaacttagcgatagcagcagattctgacacctttcatcctcgtctcaacactttggtttgatactttcttctatgatataaacagggaatactaggcagactgcagatacaggtagttttttgtttgtttatttgtttgtttgtttttgagatggagtctcactcagtcacccaggctagagtgcagtggcacgatctcggctcactgcaacctccaacctccgcctccaggattcaagtgtttaccttgccgcaacctcctgagtagctgggattacaagtgtgccaacgagcccaactaatttttgtatttttggtagagatggggtttcaccatgttggctaggctagtctcaaactcctgacctaaagtgatccgcttgccttgacctcccaaagtgctgggattacaggcgtgagccaccatgcccggccagatacaggtagttataaaaatcaacaagaaagagacagtctggtggtggtagtagtttcaagaaagtgctttctcttcgactgcaatttcttcctttctatgaacatttatttattgatgccctgtaatgcccttcacttctttgtgcacacactgaattttaattcagtcttcacagtcctgcttaaccatcacagcttctgtgaactttttctgtatatcattttgctctcatttcaacaaaattaatcacttttgctattttatagctgtagattacatatccctcttgtactgggtctttataatattttgtactcatttggatacaaatacttctactgctataggatgggtttcccttaaagtaagtattatgcctttcttgtttatctttattattcagagcaaacatgtattttggtgaaagcaaaggcaagttaatggaactgatgtatctttaagttattgtctactgtttattttctctagttttatgttttaatgtaggctgatgttttcatttcttcctttcattaatccatttctttattactgctaaaagttaactagtatttgttgttagttttttgttttcttttgttttagagacagggtctcactatgtcactatcttgcccaggctgtactcaaactccttggttcaagccatcctcctgccttggactcccaaatagctgagactataggcatatgacactgtgcctggctgggtttttgttttgttttgttttgttttgtttttgttatttttaacatcatatgatacttgattgacttttctaaacccgtggattaatatctgcttctaaagtaaaaaattgttaaccttgttattgaaagctagaaagagaaaatgtctggcttaaaggctatcctaaatttttgaaaaattcttatgagaatataatcatctatataaagggtacatttggaaaatacaggtatatctttaagaaagattcagaatttacaagaaaaaatattgaatatgaagatgattagacaattgaacaaatatgtagataaatacatcaatttttacaaaacatgaaatagcattaaaaagagaagaatttatcactgctatcacttatcactgttgcagaggtccgattaatgcagtaagaaataggagtttaaaagttggacataaattgatcagataattattattttctgataatatttcctgtaaaatccaagataatccactgaaaatatagaaccagttgaacaatctacaaattgactggagtcaagagaaatatatataaaacagttgcattcctgttctcacaaaattactcataaaataattagaaacttctgtttcaaattgggatgtagaacagtaagaaagaacttcgctttcatggtaacaacaagaaaaccagactaaagaaatatctttttctatgagtctgtcaaggagcaagcaatgcagaaaaccctggctgaattgaattttaggaagaaataagtgcttcataggtgatcagagtgctgtggcagcttccatatctgaggctaaacacttgttcagacagcggaggagtatgctattgtagatggggagaatttttaaggtcaaggggaaaccatccacccttagacaacaatgtagcctagtaagatgaaattagatctaaaagtctaaatgccaaagcaagtagctcagccccaggttacactattatcctccacacttgaattttgctaagataaagtcagttgaagaggccctagaagtggattcctatgaaattttgccatgattggattccagaattatgaataaatttaatccaaatatgagccaaaaatatttatagtcccagccaagtcccccgctagctcaaatgaggataagatccaaaaggtggcatcaccaatggttgaaggttgagctaaacacaagtgaactaaatacaattaaagcccaacttcagttctacataagtcagtagaaatgtatccacagattgccaaattactgtaattagaaagcaaagaatttaaagcaaatattgtaaacatttaaaaaaaattaaaggtaaaattcatataatggatgaaaagataaaatattttaagagataaatgatagctctaagaagaaataaaatggaaattctagatctgaaaagtataaatttacaataaaaactttattggataagtataatagcaaattggtcagtgcagaataaaagattaatgaatttaaacacatatcattatgaagtaaccaaagaaaaatgaagagaaaaataggttaaaaaataaacagatcgataacatgtggaataatatcaggagatttaacatacatggagatgtgggttccaggaagaagaaataggcagaaaaatatttgaagaaataactgttgctaaatattcaaatttgatgatgaaacaacctaaaaatgcaagaagctcaatgaattccaagtagaataagtataatatagccacatattgtatactcacagtccgattactaaaaaaaaaagattatggaaataaaaaccttaaaatcagctagagaaaaggaaaaaggcactacatagaagaaaacaatgaaatgaatgaaggctaacatttcatcaaaaataattgaggctagaagataatacaatatctttagaaactttaaaacaccaatctcaattctatattcagtgaacgtattattcaaaaataatttgaaagacatttttagattaaagaaagagttagtatatcatgaatagtcttgcattacaagaagtgctaaaaaaagttttaggctaaaaataccaataataactcaagtgtgaggaaaaaatgaaggaaaatggaaattaaaaatgtgaataaacagaaaatattattaaaaactcttttgaagacatttgattagtgaaaacaagaaattttaaacatattctgcagtttacaacatatataaaattaaactgtataaaaaatagtacaaataattggacaatggtaaatggaagtatgttgctgtaaggatcttatatgtgaagtagtataatgttaatttgtgatagtatgtgtgttaagaatgcatatgatgatccttagagagccattttaaaaagtctaaagtctacctagggagatgaaaaaggtagcaaaatggaatgttaaggtaactcctctaatccataacaaggtagggaaggcacagcaaagaagcaaacagcaaatgcaaaaaaaaaaaagaagaagaaagtaagaaaagagagaattcaaatagcaagatggtaaaattaagttaaaaacatattaataattatgttgaatataaatgcacataacacaacaatcaaaaagaatagattattaaactggctaaataagcaagacttacaaagggtgtacaagaaacacacttcaagtataaaaacataaaaagcttaaaagtaaaaggatggaaaaaataaaccatgaaacatttatcataagaaaatggtagtggcaatatttatatcagccaaaattacctttaagaccagtaatattactaaacagacattttataatgatagtcaattgattaagaagaaattatcctaaatgtgcttatatgtagtaatagagtttcaaaatacataaagcagaagtttacaaaccaaaggacaaaatagacaaattcccttctatatttcaagatttttaaatgactttcttagtacttaataaaagaagttgataaaaatctataaaaatacagaaaaatcaaacacactatcaacaaacttcagtgacagttattgtacattctatacaaaactggaaaatagctattgtttttcaaatgtacatggaaagtatgtatatttgaaagtatgtacactacaaacattctacagctaatatgctgggccataaaagaatcttaatatatttaaaaagttgaagtcagaatatattctctgtttatatagaattaaattagaaatcagtctgaaaatgctatctggaaattttctaaatacttcaaattaaacaacacatttctaaatgccctaccaattaaggggaattttttaacaaaaaataaagtataacatgaactttttggaatgcaccccaagtaaggcctggagagaaatgtataggttaaatggttatcttagaagaaaaaagtccaagctttcctaagcttcttcttaaaacaggcaaaaaagaacaaattaagaccaaagtaataagaaatgaaaaaaattaaggcagaattggatatcaatgaaatggaaacagaaagcaaagcccagaattgatttgcaagaattatgggtgttggggaatggagagtggtaaggggagagaaggaggggggagagagaaaaggagaggaagagagagaaaaaaatattttggattaattttaaaaatctatcgatatgatttaccacattaatagaggaaatagtatagcaaaatatcatattatctcaatacagctgaaagacatttcacaaaattttatacctattcataatgaaaactttcagcaaactaagaataggagagatgaaggaccactacaaatattctacagaatacatatacatatatatatatatagtatacatatatgaaatgtacactacaaatattctacagctaatatgctgggccgtaaaacaggcaaaatatatatacaatatatatttaatatatatttattatatatacttatacatacttaatatacttatatatttatatatataaatatataaaagtgaaatagtgcatgttttgattttaagatagggatcaagttttcgttcaaactttaccagtagttctagccactgctaaaacaatacgataatataaaagtcataaatatagaaaaggaaaagaaaatgtatttgtcatcgacataattttgtatgtaaatgctttaaaaaatctttgaaaaagtgttaaaactaataaatgaacttggaaagattgcagaatacaatgttaatataaacaaaattaattgaacatactagcaataaacaatttaaacaaagttggatttaaaagaatattcaaaacatagcacttaaatttaacaaaataaatgaaaatatttgtatagccaaagctataaaacataacttagaaaaatcaatgtaaacctaaatagatgaagatttatcatgtttgtggatgaaaaacaaaatattgttaaaatagccattttcctgaagtcaatttattcatttaatgtaattccaatcaaaattccagcaagcttttttgaagaaattcccaagttgattctacaagttgaaagacctagaatatccaaaatactattgaataaagtattaaaaaaatggcaaactgagccatcttatttcaagatttaaaataaagccataataattaagacttcatagtatttgtactggcaaattaatcagaaatagactcagacttccaatgtcaattaaaatttgatagaggtaaggcagttcaatggggcgagtacaatcttttcaacaaatagtactgtatagtgtataggagtcaaaaaaaaacaataaagcttgacccctatctcacatcatgcatacaatttaatttgagatgggttcatagacctaataaataaaagctgaaattataaagcttctagaagataaatgagaaaatatcttgatcatcttggtgttggtaaagatttctcagacaaggtacaaacaaagcgctaaccattaaaaaatggtaaattcaacttcatctaaaatattaagaaaatgattgccattctaactgatgtgagatggtatctcattatggttttgatttgcatttctctgatggccagtgatgaagagcattttttcatgtgtctgttggctgcataaatgtcttcttttgagaagtatgtgttcatatccttcgcccactttttgatggggttgtttgtttctttcttgtaaatttgtttgattctggatattagccctttgtcagatgagtagattgcaaaaaatttctcccattctgtaggttgcctgttcactctgatggtagtttcttttgctgtgcagaagctctttagtttaattagatcccatttgtcaattttggcttttgttgccattgctttttgtgttttagacatgaagtccttgcccatgcctatgtcctgaatggtattgcctaggttttcttctagggtttttatgcttttaggtctaacatttaagtctttaatccatcttgaattaatttttgtataaggtgtaaggaagggatccagtttcagctttctacatatggctagccagttttcccagcaccatttatttaatagtgaatcctttccccatttcttattttcgtcaggtttgtcaaagatcagatggttgtacatatgtggcattatttctgaaggctctgttctgttccattggtctatgtccaacaatgacagactggattaagaaaatgtggtgcatatacaccatgaaatactatgcagccataaaaaatgatgagttcatgtcctttgtagggacatggatgaagctggaaaccatcattctcagcaaactatcgcaaggacaaaaaaccaaacaccgcatgttctcactcataggtgggaattgaacaatgagaacacatggacacaggaaggggaacatcacacaccagggcctgttgtggggtggggggaggagggagggaaagcatttggagatatacctaatgtaaatgatgagttaatgggtgcagcacaccaacatgacacatatatgcatatgtaacaaacctgcacgttgtgcacatgtaccctaaaacttaaagtataaaaaaaaagaatcaaaactttaaattaaaaaaaaaatgaaaaggtaagtcaaagactggattcggctaggtatatgtttaacttagagaatgccaagcagttttccaaaatgattgtttaattttgcctttacattagcatgtatgagagtttccattgcatcacctattcagcagattttggtgtttttaatttgaccaattctagtgagtatggagatgtgtctcattgtagttttaatttgcagttcctggatgaatgatgacactgaacatctttctcatgagcaaatatggttatttgcatatcagaatttttagtcaagtgattgtttagacgttttgctcattttctattgggttgcttggctttttattgagttgtaggatttttttatgtattctacatgtccattgtaagaatttaaatttctgataaaagattaaaaaaatctatagtaactttttagcagctttttcattcatactagggacttgtattacaggttccttctcttgatttggattttggaaggcaaaattttcatcagctgaaatgtattagttcttgatttctttttgttcttacaatagctttgtatggctattacttgacaatttccaatcattttgaaatgtcttacattttcctgtatctgcaataacaaagttaagttgacagggataaaggcttttggatggctttttatgtttcttagttcaagagagacacatttggtttttgaaaaatgtttgtgttgaagtctaacatacatacagaaaagtgcaaaaagtagcagtgtgcaggttgacccatttttataacccggatagccttgtgtacccagcacccacagtacaaaatagaacactactgggcccccagtgggcctgccttgtgccctttctaaatcccagccaggattacctctatccagacttctaacatcatacgtggatttttgtctagttttgaacttgatataaatgggatcatacagtatatattcctgtgtacttagtatctcttacacaatccatgtttgtgagattcatgtatatagttgttcattctcattgctatatctgttgtttgtacagttgagtgacacgtgtgtatgtttcagtttgaaggtgtaatgaaaggtcttgctgtaaacatacttgtatatcttgtgaccctatgcatttgggtggggctggatgtagatccaggagtagaacggctggatgaaaacatacatatatcaaaagatacaagggtaacttttttgtttgtttttgagacggaatctcgttctgtcgcccaggctggagtgcagtggcgcgatctccactcactgcaagctccgcctttcgggttcacaccattctcctggctcagcctcccgagtagctgggactacaggcgcccgccacgacgcccggctaatttttttgtacttttagtagagacgaggtttcgccgtgttatccaggatggtctcggtctcctgacctcgtgatccgcctgcctcggcctcccaaagtgctgggattacaggcgtgagccactgtgcccggcccacaagtataacttaataaatactgtcagtttttaaaagaggttgtacgctccaactagtagtttatgaatgttgcatgtatagatattattacattatatattataaatttaacattttactttttaatttaatattatatataaaaatatatgtaatatatacgtgtgtgtatgtgtacatacacacatatacagtagttgcacatatttggctacactttgtgtttccttttcattttagccattctaatggatatttagtggtattgcatttcattttgcatttctcagatgactaatgataccgaccatctttttcatattttttttttctggctatgtatcttggtatcagatatatgtattgcaaatatctgctttcactatgtcatttgtcttttcattctcttattcataccttttgatagccaaaagttgttaattctaacatggtctaatttatcaacttttccctttatgttatagcttcacatttatcgtttaagaattctttgcctaatccatggccccgaacgtgtatgatttttatgattaaattttaaagttgtaaacctcttacttgaaagttaaatatttccatgtagaacttggatttttcatatttttagaatgttaggccatggatgtaagtttattttacacatctcatgtataccatttgtacaaagtatgtgttccttaaatatttcctgaatgaatgaatatagagatgcatgaaatgctctattgtttaaacactagaaaccaaaacactgaactttagaacatttcctgtctcattttttgaaaatcaaagtctaaatttcagaaagtgagaaaagtataattttcacttgtctgcccattttagtcagtgtttcagcttaacacaaacattaaaagcaaaaatattttggcactgctgggctctgatccacagctcttcttattcctgggcccaggatgataacacattcatgaggcagaggggaagacaagttcaactacacagctgtattaaaatttctgctctcctgcgcacaccgcatgtccactttcatttctttggccaacacaagtcacatcactaagcctaagtcaatagttgggaatctgtaaatacataatcttcttataggaaaagagagtgttaataattttgaatagttatgcatgttaccattctgtctcacggtagagtcagtaatgttttctttaaaatgttttatatgttaatcaaaatattatgtttatatttaaatgtattcttttttatttagttcatttaaagaattgattacatgatttcagcatttggctcaaaagatagaatttatctatatctatggcaataattaattgtcaagaatatgtttcagtgaacgtgtgcatttttaattttgtcatagattttgcacaaaagacattcattatttattttggcagtgtaaagagaaaaatgagaagattaaattatttggaaaatgctgtgggaaagtctcacatacaccatcaattccaattgcctttttttatactatagcttcccttcttaagaaattttccttgatctgtgtaaaatattatattttagttgcactagcagtgcattttctcatataagcataaaacttgaaaattaaataatatattttagaaaaacacacgaacttgcatatttcttaaatagtgcataatttttatgagattcccacgtatatcttgtctaaatattcctgtaattcttactgatttattttcattcatcagatttctcttgaattaaagacaagtagttgtcttcccagattgagcaattattgatatcttccaacacccaattccttgtttttattctcctctctactgccacatagatgactccaacacactggtagagagttttgctctcttcatgttccaaattatagcatttttgtgaaataacctcaagctgagtaattttataggaataggttttattataatatatgataccaaatatcacataaaaagtggtgacagaaagataagatttctcaagtagtgttactctgaaccataaggagagaagcttaagagaagaaaagagttggtagaaatataattgttctctgctcaggttgtagaccagactctacgtctatgtttctgctggtagatgcttccttttatctccctggtctaccctgataattaatttatatgtctcccatttctttctctatcagatttttctaattcgtgttctgtacccaccttctactcattcatttcctcagtccttatcacccagcagtcaagagtctgtccattctacttaactgaaaaagattatgtcattaccagctccgtaagtttttcttcagttctaattattctggacctattggaagtgtttacacagttaactaaccttgcctccttaaagttccctcctatctagatttccattttacaatattatcttgatctaactttattcttgcccttgtttttttcttttctgaaatgtggacatttccattaaaggctcttgttctttttctacaatctgtctcttagacatggcttttgataggtgattgccaatgtattttcctagcatcgtcttctcttctaagatttagtttctcatttccaaatggcaggcagagttttctgcatcataagttcagtatgcctaaaactaaagataattcctaaccccagatttccttccttatctgacatttctatttctgttattaatgccccattttcctcaataattggtgaaaagaatggaccattttgccccacaccatcacctcatatcaatatgtcttaatgtgcctttcctggtatgtatagagtttatcctttcaattactaattcagttacttgtctgtccttgtcttattctcccaaagcacagcactcacctcttttctgtgtagctaagttacgtctcctccctacatttcatcatgaattttgttgccttagtctcaattttgaaaatcctattcctgctctccactcaaattttaatttcttccattaatttatgggatatgtttcaaatgggtggctcaatcatttcagtgcacttaataggggagatgagagagaacaatacatctagtagcaggagtccaagtgtgtttgactactgaaaagcaatttgttggggcaaacaattctattctgtggagtggaagagttgccaggaaggactgcatcctgaatctgacagcaagaacacaacattcaagcaggccagagtaagagaagaagagagtgtgtaacaatgagaaataaaaatcactaggacaagtttgttgaaaatgaccaagagcataaaacgtagaagatggagatgcagaagtcaagaaggccaggataaatttgatttgccttcttggaaagtctaaagcttgtatcctaaacttaacctttgctgtgactaaaggaatagcactctaaaaatgacttagaacacagcattctttttcatctttgtcttctatacaaacttctcaagccagattgtacagatgtggtctcacctatttctccagatttatctaactgtctccctcacaaccagccttcctcaaactttccatacctctaggactttgtacaattcccgccaaatccttcatattctctaaaaacaagctgaagtactatattatctaaaactgtcctcaatttcttttaatcaggtattttgtatacatccctataccatttatcacattgcattacatttttttaattgtcttttttctcaactagaactcaatgtcagttatgggcttattagtttttcttctttgctgtgtatcggagtactattcaacaaatgttagtgttccatagatgtatgttgaaaaaacgacagtccaatgttcaccaaatgatatctgctttcctgccttcaaatcctagctaaagtttttctcttcagacatggcttctggagtagttgctgtctattgaaactgagttaaccaccacccacctatgtagggcttttggttaccagcccagcctgaaggaagatctccttcctttaaatttttattatcctgcctgactgtatttttactcaaatcagtattcattcattattcactattgtgttcttgagatgttatttgattttcatatatggtcttgagctcttatttgattccacaggataatttgttaagacatatacatttaatattttcaactaaactggaaattccttgaaaacagagattgtgtctcttaccagttttaatgcattaagcaaaaagccttatacagggcaagagctccacagtatgtgttgagtacgtgggatactgagtagagtggagatggggccatgtaatggtaggactggagatggggccatgtaatggtagggggaaggcatcattcataggactggagatggggccatgtaacggtagggggaaggcatcattcataggactggagatggggccatgtaatggtagggcgaaggcatcattcatagggctggagatggggacatgtaaaggtaggggggaggcatcattcataggactggagatggggccatgtaatggtaggggggtgacatcattcatagggctggagatggggacatgtaatggtagggagaaggcatcattcatagggctgttgcatattgcccctgcttcctaagctgtggaaatttctatgagaaaagagcattgtatatcctatgatatgcagggctagtatgtgctctgaagggtcagtaaagatcccaaaattctgaaggctgcaaaccatttggttatagggtggtgtttcaggaaattacctctataggcctcttcatggcaggtctttccaatattaacttctattactgaaccgattctttaaacttcataaatattttaagcaagaccctctgtgtttctttcactcttgtcaaaaacccatttatttttatgactctctgataatgttttcacattgatactctgagtatccaattttgggttgacaatatgtctttttgggttgatgagttttgcataaatttaaacttcattatatattgattagcaggaatgtgggcataagattccaagtactgaatggcatttaaaatgggatatatttaaaaccaaatggcctagaccatgcgagtatattgctgtgtataatttcctgactgtactcactacatcataaataataatgaaagtaaatgtacatttatcagaaagaatcaacaaaaccccagcactgatttgctgatcacacttgtcttaccaggcattaaggccagctttcgaacaaaagtgcctgaaggtttgattgtctttgcagcatcacctggcaatcaggaagagtattttgcacttcagttgaagaagggacgtctttattttctttttgatcctcaggtaaatgagaaatcataaactttaatatttttaagaatttagtaggtgcctggtactgaggtaaatgcttctgttttcacactgaatcttcattcaaaccttgtaaggtaagtactattattatccccattttgccaatcaagaaaatgaaacttacaaaagtaatgtgacttgccctcagctaaaatagcggagctaacttttaaaccatcatggtctgactgagaatctgtgggcttaacaaccaaaatgccaccttataatgaagattaaaacttttaaataaatttaaagagatctatttttatttttcttagtagcaaaaaatcatgtccccttttcttccttccctgtctttcttttttcattgtttcaccagcaaatatttaagtggctatcgggtactatggtactgggcgttgcagactaccatagtttcaaagttaaatatgaccatgcccctgcaaaggatacagtaaaataatcaatttaaaattcttataaattgtatcaaaataaagatttaggattctatgtattataggaacataaaataaagaaataaattgttttctgagttgtcaattttctctggaaatgtgatatttaactgagatacaaatcaatgaagaaaagttggtcaggacaagattatatgtctgtatttgagggtgtatatttcaggtggggcagtacaggggagattctgatctccacctgggaaggtgctgagcataaagtttccaggcaaagtgagcagcaaatattaaggaaatagcaaatattaagtgcctgaggtggacgagaacatggcacattcagtacactgagatgaatctcttatggctgggaacagagacaaagggaaaggtggtagattgaaaagctgggtagaaaccaagtcatttaagaccttgtaagcaaatgtgaggatatgaatttttcctaagggcagtgagaaagcactgaacagttgtcttcacttgagttgaacaaatatcagtgagcatttgatattaggtattgtattaagcatgtgagatgagtaagagaaatgagtaagactaagtaaaatatattagctttccattttctcagttcttcaacttaaaactgatgatctaaatcacacgttatgcttgacaaataaatgttttacattttattggtaaagcagacacaacgttcaccctctgtatccaagttgcgtctaggatcatggactgagtgatctgactgaggatctcagcctcatgaaccctggagatccattgaccttagagagaaaaggcagggcctattgtaccaagtgtatctgaggaccctgccagactcaaaaagcaggccaaagtcctcctgctttatgaagctgggagagccgcacagtggccactcgaaggaccagggacagaaaggctccctcctcatgacttgacagggctctgctaactccctggctggtgcacagcaggtcctcagacacaaagatttctgagcgtcccctagtaatgcagcttcttaaaggatgccagcaggtgggcagtgagtaagcaaaaggaaatagcatcacacctaagcagatcctgcagccagagggaaaggaagaagcagcagctatcgcagaaggcaagacagatggcaactgaaaaaaatttttaaaaaatcagctgaagttgattcaattacataatggaagatattattttttatttgaaaactttaagtagattaattagaggagagacactgagcctcagattagtaggtcagaagattaagttgaagaaatctctcaaaatacataaaaatgtgacaaaaacaagaaagttagatactactactgtcactaagaagcgaatcggaaggagaacaaaaagcacatgctcaagaaaaagagggataacataaaatgatgaaacaaaaaataggagagaatatctgatttaagagggaatttagtataaatccattgaaaagactcatcaatttcctgtcaagattaagcaaaactaatacttctatgagacctctttgtgccaggcattattctaagtggtctctctatacatcagtttgtacacttacatacacacatatgcctatacacacacacacacacacacacacctacacacgcacataaactcatttgaacttttcaacaactctgtgaggtagatactcttcatattcccattttacaggtgaggaatctgggccacaggtaagttaattttccccaagtcacaacactaataagtgaccaagccaggttataaacacaagcaattgagctccaaagaccatgattttagctacagtgctatactgcttttcaacatgaaagaaagatggttgttgatatccataaattcagaaaaaaaaaatccatctctgcaccaggttggaaagaaatatttcagtaagtaatctagccaaaaggaaaaataacagagtcagaaatataaaaagaagaagcatcagtgaataataaatctagtaatattaagttatgcctaaatatttaatgatagagtgactagaactctgttttacagtgccaaatgagaatctttgaaatagaagagaagtatagcaaaggcaagaaaaaaaacgtgaataatcatttgttgctaaaattagtaagatttgaaggagaggaaagatgagtgaattaaaagttctgaagataccagcttagtggcggggtgtgggtggaataagggaatagattatactgacgttttgttttcgttaaataaatagggcaaatgtttgatttcaaatgttatagaaaaataagttactactaataaaaagtgctcttcaggacatccaaattaacaaggttaaaaaggacagcaaatgctaagttaaaaaatcaacaaaaatcagaaaaagaaaggggagagtacagtaaaatagaagactgtcaatgagaaagaaaaatctggctctgctttttccccttcaacctgttagtatctggagatatttaagaagaagccagatggaaaaaaaactaatcacaggaccacttgtttatagagctttaaagtatacaaagtgagttcctgttaatgatctcatttcattcttgaagtagccccttgaggttgattttgttttcatccctgctttagatgaagtggcttaactacggtcatagagtggtttagggatagaactagcactgaattcaattatttgaatagcactgaattattttattcaatgaaactttgctaagaatttattggacttcacagttatgcactgggaacacagaaatgaacagaatgacactcattggaattctggccattggttgttcatcacagattttgagtatttatagccacccccctaccaaacatgggacagtcattggagaattaatccaaaaatgatttccccaagtctgaagcatgactgccatctcttttgacatgtggtgttgctatttctaaaggatgcgataccttaagactctgtaggataggagggtaaaggggtcaaactgcttaacggagaatggctgccaggaaactcatctggcaggtctagttgttttcatatcctttacggtgatcacctggacaggctggtgcaaagcgtggtaacagaattcagggaaacattcacagggcatttgcccatcatttccgcccccttacccttctcattcacacaattgcttagagtactcgtcactgctattagttttcccagttgctctgtccctaccctgtatagccaaaccctaagctgtatacatagtccgcaggtgccagccaagtattaataaaattgttaaagccactgggcgtggtggctcatgcctgtaatcctagcactttgggaggctgaggcgggtggatcacaaggtcaggagttcaagaccagcctggctaagatggtgaaaccccgtttctactaaaaatacaaaacttagctgggcgtggtggcaggtgcctgtaatccccgctactcgggagactgaggcagagaattgcttgaacccgggaggcagaggttacagtgagccgagactgagccactgcactccaacctgggtgacagagtgagaccttgtctcaaaaaaaaaaaaattgttaaagccaagttgggggctaaagggagtgaggaaggtttaatgatgtctagtaagtaaatttttatctgaaataatctctctccataaggtaaaactgcttgagttttcaggaaagtgacaattattttttaaaatacaagatatgggttgagcaggatggccttaggatctagctgagaaaatgtaatcagatgcattacactatgtgctcacgggccatgaggctctctatatatgaaacaacgagcttatgctagcaaggactgtgtccttccttacttccaatgaatttatactctaaaacaggtactaaacatattttctaaatttataatgaaagccccactcatttttagacaaagaagtgttaaaactgagggatggtgaaaattttgaatactcttctcttatttgctctctttttccaaagtaatatcaatgcagcttcttgtatgaagttagagctactctgggttttaaaaagtatagaagtttatttcatatgccttctattggcattacatttatttatattttaaatactttgggtaccactttaagtcagtttttctcctttaatctttaaatgcggacgagattatctagtgaatactttttatactcatcacacaagtaattatgtacttagtgtgtctgtcttatcagactgtatgatccagtgagggcaaagtctatgaatcttttgcccacaggtacttcctcaggacttagaacagtctttggaacatagtagatgcccagtaaataaatgaccattgacatattacctggctgattgactcaataactgttggtaggatactactactcataactgaagaaaattatccatttttctggcttacaacgtctagctttgtaatgattacacagatattttgtgatgtttgttttatttttttttattttgaaaaaattagagaaaaagtcttgctgttttgctcaggttggtcccgaactcctggcctcaagcaatcctcccaccttggcctctcaaagtgctaggattacagacatgagacaccatgcccagccttgttcaaatttgtctgtttttcagataatttgatttttatcaggaaaaaacgagatgcttatttttaaattgtttttactgaattcattcaaaatagccaaattttgaattatgaagagaatttcaaggaattttaaagtagttatctagcacatatttataaaataacttgaagtcattgtgtactttgctctttttaaaatatcttaataaaattgagtattaaattccttacaaaacaatttaatacaacgtagaggctatagatataaaaatgtatttggtttgtcatccaactatccgaagcattctattgaataaatgtttagggaaagggagattcttcatagtacataaaattggaaatgtgtttgtatattacaaactgggcacttgccattgttaaaagatacaataaagaaaagttaactgcaacttttaattacagtttttattgttatctccaacaattttctataattttcccattcttcacttaattaaattcaattttgaatatacttgatcagataatattttagtgaccagtaatgatctatgtttatcccttaaatattctatgttcagtgacattaacaggaaattcacatcatattctgggcttacttggaaggaagctgtgaaaatgaaagctttaaaacaattctgaatagcatctattgaatgtgtctgatatgttccaaatagaaagaacaacatgcataatatgacaccagaagtcatcacagaattgttctttcaacattgatggggggaagtaatcttaaaatagtcttcaaaaaatgatattctaaattgctgtaagtataaagtgagtttgtcatgctgaggctgtaggtaatgtacttgaatttgtctccaataaacttgatttctgatgtagagaactattaatgcttcagattgttgccaaacaaaatatgaagaaccacttattcagacacctgatctttagaatgcagcatcgtttgtaacaattttaacgctaactaagtacactttgatgagacagcatttaataaaatgctcattaatttcatcattagcaagggtatgctaagaagtaagccagtttcttatgtcacgcccaattagcatcccatgctagtaatcccattagtattgttgaattcactaatggaaaaactaatgggcatgctaccagggcacattaattgggcacgacaccagttctggttttaattattaaactacgataatgaaatgtgtgtttgtaaaatattaaaatgttgaaatagggttgaagaaaataaaagggtgtgtagacaaaacagatataaggaaagtcaacctacaaaaatacgaagactagaacttgccagatggtcatgtttctagctgatggagttgtctgtaaaagttgggatattgtccatgtgagagacaacccactcatactcatgggaaattaaaagctttttttttttttttttttactttggtaacatgaaattctgtatgtcatacatgttgtcgagctctttatgaggcccgacaggaaccaattaaatgtgtagagtggacatgttgtatcactgaagccatttcagagaaagataaacagaaatcatactaaagatggtatgattaacattgtatgtttttcaatatacatcttcagcaccattacatcaaacaattatctattttctctttttgaaaaaaacagcatagcaaaattattagagtttggtgaaattttctggtaattaagtgttttggtaatattttacccaatctaatttttttaatttttaaagattttattagaatgagctttattcttgttaagtaaatcaactttattaagaagaaaattcattcccatttagaagttgtaatttcttttttatttttatttaatagtagtactagtagctgttggtgacaaagttgggatatctttcacttagtcttattcacttaacacagaaaatgttactataggtaaccaaggctactataacatactggaaaattgtttacttttctcgaaagtagtgagatggcaggtgtttcttctatttctctttctcagtttttttttttattcttacctcctatttgctaaactctgttcttaatatctgccatttcctatgtcttatcacttaggaacatgtttttaactattatatgattaccttagccagaactataattattggattttaactacaaagcattgtgtactacatttaactccacccttatgtttaatgtatcacaactggctagtttttaaggtgaatgtcattcccatttgttattgataattttgtgaagataagagtgacttgtctgacatctctctatcttcagaactcattttgagtggtattttatgagttttaaatttttctcttctttttcatatttatgccatgaaacttaaagtctaaaattttagaatagaaaattctttacccttctgatgaatagctatattcatcagaaaatgcaagtgactttgtaagaaattcttactgcaaaggtgagacctttacagatctgtacactgtggtgcacagggaagtattaatacatcacaggaaagccagaatgatgctagacatcagctttaattttgagttctgtttgaaatgtatgcatgcttgtatcaggatcataatcttgaaacttgtaaattggtttataacaaatatgtgtgtgtttatttgtagatatgcatgtataaacatttatttattcattcattcccttaaggggtcaccagtggaagtaactacaactaatgatcatggcaaacaatatagtgatggaaaatggcatgaaataattgctattaggcatcaggcttttggccaaatcactctggatgggatatatacaggtaagtactttttgatatgtataaatagccctgttgatatgttggtgttgccatacttttctgttgtttatattcctacattcttatttcaccataatttctactcaattccatatatattgctgttgaatttgcctttgggatgctcctaaaaggatgaagtctggcaaccagtttttcatccatgaaggtctttggtaaagaaaaaaataacaatgaagtcacctatgtcttttacagttctttacaattcgtgtggacctttagttatgttctgtcatcttacttttgacttccaaaaaacacatacagtagaggaaagcagtttttgtctgcatttggagatgaggaaaccaaggctgagaaaaaagtaaatattttttcctaacttacacagttgagaggaagcattcttgggacacacatcctgttttttcacatttaagtttagtttttgctccagcctaccctatctgccacatttatgtaattataacatgatcactgtacctgtataatgatgcaggcttttattaaattattcaggaaatatctaattttaatcagtacctattatgttccaggtattgttctaggtgctctggatacaaggagcaaagagaatactgtaaaacttacattttatgggaggaatggggcagcaaaatacagaataaataaatttaaacaaatatcaagtggtgataaattctgagaatgaaaaagccagatgagagggaaagttgtgtgtgtatgtgcgtgtgtgtgttaagaaaggtctctctgatgaggtgacatttgagcagagacctaaagggacaaaggggaaaccatgtaaatatccaggaagaggatgctttgggttgcgaggacagcaagtatcagggccctgaagtgagagcacactacatgtggcatgtcaaggaccaacaagaaggccagtgtgggaaagagggtgtaaaagagctaatgacatgacataaggtcacagaggccattagggatcagattatatgggaccttgtgggcttttactttgaaagaaggaaactgttgaaggattttgagggaagaatgacataatatgacggctttctttaaaaggatcacactagctgctctgttgagaataaattttaaggggaatgagggtgaaggcatggagatcagttaataggcttctgcaataactctgtaataattcagacaagaaatcatggagacctgaaccagggtgataattgaagatataataagaagtattcagattctggttatactgtgaatgtcaaattaacaggatttggtgatgagattgaggcagaataggggttggtaaactatcaccatgggctaaatctagctcatgcctgtttttataaagttttattggagcacaactacacccattcatttacgtattatctatggctgcttgagtctgaatagtctacaaagacactgtctggcctttgacagagtttactggcccttaatgtcgagcaagcctgtcaggtttgggtctcaggcaactggaagaatgtagctgccaaaaccagggagtgcatgactgtgggagaagcaggtttggggagagacattcaaagttcagttgagaacatgttaaggctgagatttctaagacacccaaggggagatatcaggcaggctgctcaagaaacaagtctagttctgaagtcagaacttccagcaaaggatggtattgaaagccaagggaacagatgtaagtagggctaattggagtggattgggctctggaaaaacaaacacaaataactttgcctcttctctcaaagaaggtgggcattagaaatatgaacagggatttccattgttatgccacacagtcagagacccaggttcccctggcctttggccctggcagttcgtactggaacccagcccactattcatccctctagagtacttagggggtgcctatgggtagagaaaggaagaggcctgagaggcaggcggtctggatcattccaacatcatgatgctgggatgttgaggaagagccagtgaagaaaagtaatgaacaggcaatgaggagagaggaaaaccaagagagtggtatcccaaaggctggtgaaggattttattatttgctgagctagtaaaactagagtatcctggtgaaggtgtatttctcatctcctcttctctaggttcctctgccatcctgaatggtagtactgttattggagataacacaggagtctttctgggagggctcccgcgaagttataccatcctcaggaaggatcctggtgagtttagtaaggtatattatatgttgtcatccaaacttagaatagaacctgtttacattattttaaagtaagaataagtattatgttctacctcatgctatattttctatattaatgtgccaaaaatttcctttaggtctcttttttttaaaggaaccatgtattccatatgacttgtatttatattgttagtactcggttcttgatatataaaaggaattcattaaaacttttgctgaaatgaattataataatttcagtcaaaggtatgttattttaggacctatgcatagttttttctaagattttaaattgaatgtgaaacaacacagaaatggaaaactatgagcttgatttatactctaaatagggtgaagaacattccctgaatactatgtgataggcactaaaccaatccctagatattcatagatgaataaaatgtggtctttatcacaatagaggtcacaggcgtataaacagacaattccagcctaatgccattagtgctataattgagctatagacaaagtgattctcatatttttagaacaagagcataagaacatattctaaaatgaaactaattaaaatgaacatgaatggaattaaccttagataggaaaaaaaatcacccttcaaacgcaatgctaatattctaggattgtttcccaagtcctcattaagaatcacagggtgcctcccaagtctctcccaggaagttaaaatataactacataaatattacaaataagctagaacccagataagtataatttgttcatgggttgcagtctcagggaatcatgatgaagatcaaaaggaatagaaagtgttcatcaaatttaggagaaggatatagttgaatcctcaaggctgattatagttacctcctcagaaatgtctctagattagagagggttttcattcaactacttgagactgacagagaagtccctctaaaacacacacacacacacacacacacacacacactcacgtacacagcctttgttttttgcccttctgggaaatagtatcttcaggtactaggagagaataccctgatactaagtacccttcctgtagaggacacatctccattatgaataaccaattttactttgtctatgtaaattggccttataaaactctcataaactcaaagctgaaaactaagctttgcccccataggaaaggaggtggctgtgtgaaattcgacctcagtgcaccttctcctcctcttgatttttttttcttgctttttctctaattctctcatttgcacattttctctctcaaccttctgttatcaccctattcactgtatttataaagccacctctacctggtctggagagttccacattcaagatcaacactatatacatttcccaaaatatgaagccaaattattgatttacttcagtaacagactggttcatagatgaggaatctaaactgtaaactatatattaaatagaaacactcccttccaatctaacttttaaaattatagtactttatttttgaggctagtggcagatgaattttctgtgttagttgaaaaggcaatattcttgctactgcaaaaccaaggtttctgcataaacatctgtttctgcagatatgatgggtttgaaccagcactaaacattataattgctatcatttactatagctgatggtgtggtgtttacatgaatcattaagaggcttgcagtaaataggtagtgagagctagtgcctatttctttgactttaatggcacataaaattaattgcttgaaaataatctttcaaaatatatatttcttgatatctataaactcctgcagagataatccaaaaaggttttgtgggctgtctcaaggatgtacattttatgaagaattacaatccgtcagctatttgggaacctctggattggcagagttctgaagaacaaatcaacgtgtataacagctgggagggatgtcccgcttcattaaatgagggagctcagttcctaggagcaggtaatgctctaaaaaagacatgagtgttcacttaaaatctatgttctatcctttgtataatttaatctctcctgtttgattaacttgacctcatatgaacctagtatcacagaaatacttagttattccaatggtgcacacaaatatattcttgacatctgaatatgcaatataaattataagactcataagtatacatccatgtatgatatctctggtaactcatgcagttcttgatttacatatgttagcatcaccaatgtccatttgcaaatcagttgtttggaaactagaatgcagttagagaggtgtacttagaatgcactcagaaagatgtttcaaagagttttgtttactaggttaatccacaaatgcctatttatctcattatatagaagaacaatgttcttagttaattctcggctaggtaatgggttaagtaggccattgagagagaactggagactagaaccaccatccctgccattgctcaaaaggctacaatgaaaggggaggtgtaagtgtctgtagcttacccctgacatgcatgcacattgagtctctgcctgatcagagcagagacttccacccaggggaaggggagagggatgatggtggcttggtgcacccggcttgttcatcaaataaaagcccatcactgcctcctatatttacagctaagttggttggttattaagttgcttaaactgccttcagcacaaaaaggcatatgatattaataatataatctacacattttttattctgttttcatcaaggtcattctgagtttcttttagtcaatgcaaactacttattgttaatatttatctgaaacagtaataatcttacatgatacagacaacacatgatttagagagcaaatttcttcctgttaaaaagtataatatatatcaaagtctttcttagtatatcaaggtctttctgtcacttctgtgcaattacaaaaggaatttcttaacattgatttgcatcttcttttgtgagatttactcagtggcagactgtgtcctagagtttcttagcacccttacaatgctggcaatattgtgttacacatgctaatatgtacatatttttatctttaaagggttcctggaacttcatccatatatgtttcatggtggaatgaactttgagatttcctttaagttcagaactgaccaattaaatggattgcttcttttcgtttataacaaagatggacctgattttcttgctgtatgtgaattaatttgattaaaattactttaaaatataggacccaactttaaaataaataaaccatgtgttggcattacacttaattggggtttctttacaaattcacatttgttcattttttttcccagtcatttttagttttgaagtcctgtgaaacattttgtattttattatcctagtaattttttaagatgacaattgtaacaattataattttaagaaaacagactagatataaggaattaagaaaattcaatttagtatcttaagatatgaaaaacactatttccctcattatcttttgatatgagttttgaaagcatatatattatatatttttcatatgacatatagataatcaagtataataatatagtgaacactcctggacctaccaccacgcctgataactgaatattatcatttttggtctatctataaagtctttcctatcttgtttccatctcctttcagatgtcataggtaatcagaattttgtatttgttattcacatgcatttttatagtttgaacacctaatgaatgcctacaaattcttgcttttgaaatttataaaattggttttatactctctctttagcactcaacattgtttctgagtcatttatgtgtccacataggtatacattttcttggctgtgtagtatttctcttctcttaccaatgatgtattggttgttcccatgttttgcttcaatgaataagactgctataaacatttttatacatttctctaaatacaatgggcaactgtaactgcttttccttgtctttaatcattagtttgataccactgttaaatacgttattaaaattttaattcttaaaagttgttttaaagaactagcatagaaacaggagaaaaatatgaacatcttacccttagattcttgatttctaggcaaatagacaaatacaagtcttggcttttaagagtctaagatacgttcatctttttttttttttttttaacattcctagcatacacaatgccaatattgctaagaagggaaatggaaatttatcccttcatagtatttattaaaatttctgcttttttaaatatttgtttgtcctcttgtgtattgttggcttctttctctgaaacgtaatgtctatgaatcttctctgaaatgtaatgtctatgaatcttcgctgaaacgtaatgtctatgaatctaaggaccttggttctcttctttatagttgtatcttcagtgcctaagccttagcaattatcatgttaatcaatattgttgaatgaatgaatgagtgaacatgtgaatgagctcatgctgtggtgaccttcactgagcatcgttgagtcatctacatgtgcatacactgtggaggatacaaagatgtttaccatttggctcctcctcttgaggaccatatgcctgagctggaggtctatatgccctactatgccatgcttccaccctccaccttcctctattcattgctttgttactgtattaaataatactgttaactttaagtaactcttactaaaaaaaaaaaattaaaaaattaaggctgggtgcagtggctcacccctataattccagcacttttagaggcctgggattataggagggtagcttgaggccagtagttcgagaccagcctgggcaatatagtgagaccctttttctatgaaaataaaaataaaaataaaaagttagccagacactgtagctagttccagctactcgggaagctgaggcaagaggattgctgaagactgggagtcgaaggctgcagtgacctgtgattgcacctctgcactccagcctgggcaagagagctctgtctcaaaacaaacaaaacaaaaaaaaatcaatacacttagataaatatatacggagtgcctattatgtgcttggctttcttttaacacttcccatgcaactgaaaggaagcagtctttcataaaacttaacattacggtctgccatatctgaggactgaggctgctcccagattacccctcaacaactctttctattatactgacttatttcaatatgcatggttatcccctggaacttgataaactcagaatgtttccattgctgaaaccttgaatctcaaaatataacctcatatccctctagctctctcagtctctctcattaagttcaccaacgcattgacaccattggctattagcccactttctagttaacttacttgctccttacctgagccactataatgtatttcttcaaccatatttctaccaataccctgatcttgtgtcttgtattgggcttcacaaaccttgatccatcagtccagccacctcgcttttcagttctagtagctagattgctaaacactataggaaaactaatacgggtatgagaacttgttttgagctctccaattcttttattaaacagtatctattgtttacaggattttctaatatattttagatgtagaaagtgaaagaaaaataatcttaggatctagaaacactataacctgaatgtcttcaggtagtctcacactctcctgataaaaacaagcatgcatattcaactttcagtctctctatcaacttgaccgtatttgagccaagccagatttcactctctaccgactcaggggaacaaatgaacaattaccatgcttacaaccaaagaaaatatgtctaccgtcatcctagattctatcccttcctctgtaagaacttgttctacagtctcccctctttgtatgttcaactgttccctctcaattggctcttttccctcaatatatggaatgattgaaatttattttccttagtgttttttcttttgtctgtgaagcctcctccactgtacttttccttaccttcatggtcaagtgcattgaaagtggttacttttgttattgccactttttcatctcacttcagtccctaaaatgactgtacattaggttcctgcccctaccacacctttctacaaaatcacttttctaaagtggtcaatgacccccacatttcctagcccaatgatttttatttcttatattttttgtcctttttctgtcattctgtttttttcttattcttccctactgattttccaaaatactagtttctcctgatttcattaagttctcttagcttctttaaggagatcattgtcacttaaaagaactattttctactacaagacccttaaaacattggtcttgctgaggacactaatcttttcccttttctctcagtctttttacactcactgaataatcttatttattttgtcatgtattttctcctttttgctgggccatccccaaactgtgtatctttatgtttgacttcctcaaaaagagtttcatctggatgttttataggcatttcaaactcaatatatttaaaatgaactcacccctcctccttgtcaacaacaacagtcagcatttctttcaaatgcttttcataacgtgatgatggcagaacaccctcctagttacccaaaaaagatgagatgtgttcttaatttctttttaattcatctaactcatttaccttttttaccaggtcctaatgagttgcttttacaaatacttctaagattgagtcttctctttcatcagcatcatcattatccttattttaatgactctcaatatgttttcacaattaaatggatttcctaatgcatttcctgaattctagtcgagattttgttttcaatgtgtacttcttatgtctggtaggctaagcttttagtgcaaggtaatactgggaagaatatgagttttggtttcagacagacaccaaacattctttccataccagaccctcctatcactgaaagtcctttaaaatctggcttctacatagctggcaagacactacctcacctcccacctccatatgtaccctttgtcttagctaagttggtgcctttctctgaacctgatgtcctcatgtcatgcatattagtccccctccttgggggaccctccatgaatcttatatagtttctaaaaccttgctttaaacctttcccaatttccagggagcaaaaagccttctctgttctctgctttcactttactcctttcttgtcttgattgttgtattgctcccacatgtttgcctctgctactagacagtatgactcttaggagcagtgtttaccttagagcagcaggtatatggcacattgtaagagactcgatatttattgaataagtggttagacaaatgaaaaattgcttacctgaggtccttcctgaagatgatgcttttatggaaaaattcataatttttatctggcatgatttaatttgttttactcgacacaattgatctcaagattttaaatatcatatggttactgatatggtttctaacaaagtaaaaatatattaggtaaaataattatcatgagacattttgaaggaaaacctatgaacttattttttactatgaaaatttgggtgaaatatgttcacattagaaaatggtacagtcatctaatagaatacacatagaagcaattatgttagttaaagatttagaataaaaccgaaatattgaatcaaaatatgtcttacatatttgaaattgagttcactagccagttaaaataagcttaatcaagcttgacatttcattttcttattgtcttgccatattttcccccaaattaaattgatatatgaagtagtattttctcattttctaaaaattcaaagagtcatagttcaaagtgttctgttctcttcagtcattcagtcacttatgcaggggtttaatcttctaactatgttgcagcaaaagtaaaccttaggtctacataacatcgcatcacatcctataatcattagtaggtatgaatttgtttgcatcaatacaacattcttcatgtcaactataagctagaaaagtgtttcctatgttcctaagcagaaacttagggtagagtgacacatttctatagagtgctttcagggaactgttttgcttttcttcaagaaattgactttctgctctctcccaaactgcccttctgcagcctttttatatacctactttcttttttaatataaaatacagatggagctgaaaagtggaatattgaccttccggttaaataccagtcttgcctttacacaagtggatctattgctggggctatcctattgtaatggaaagtggaataaagtcattattaaaaaggaaggctctttcatatcagcaagtgtgaatggactgatgaagcatgcatcggagtccggagaccagccactggtggtgaattcaccagtttatgtgggaggaatcccacaggaactgctgaactcttatcaacatttgtgtttggaacaaggtaagttccatctggaggaattcacaaatccatacagccctggtgctaacagtttttggtggttctgtgtttcaagagatagcaatagactcaggctaaaagcagcacccaacagcatctctttttctggagaaatttaaaccttaaaaactaatgaaaacactttttcaaagagttttgtgtgttacccttaacaatgtgccatcatttataatcagcatatttatttcaatatgtcctcagtaaatagtaattaatatacatattattattaatgtgacatataattatatatgtggtacataattatatatataaattactatttactgaataaatatcaaaataaatatgttgattataaataaggtaactgaggtgcttcccaaagatgatatttatatggaaaaattagtaatttatatatttatttaaatatgtaatgcaattatatgtgagatacataattatataagaaatatatgtgtgtacatacataattatatatataattatatatataatgcatataaatgtatttcctcatatgttggataatgatcattatctgtatttacagatgaaaaaataaattaagttggtatgcataactagtaaaaaatatcaatgcaattcattgccttttctttctttgacataaatgctaattgtctccatagtttttcagtagagctttcatgtggaaaaaaaatgtggggtgtatgtggttgacttccaaacatacttgtgaaaatctatatattgtagattattaataactataagagaaaggaaaagtgcattatttacaatttaggtgagaagttaactcatagacgtttgaatgtaatcagagaaataattaatttgaaaaggctaacaatatctgtgtatcatttcttgtggcagtcatggttctgagagcttacatgagaataggtgagtcaattattcataacaagtgtgttaggcattattatttatatcctcattacagatgaggaaactgaagagcagagaggaaggtaactttcccaaggtcacatggctagtaagcagatagcaagacactaagtctctcaggcagcctgttataaagtcaactctcctttttacagtcaatgctctcttttatgggcattggtcaatgctcctttgtaaagtggggaaagcatagtaacttccagcataggaccaagcaccctcccacgtgtgaaaaaggtcctttacgtatttcaaaatctacataccctgaatggttaaaattttcatgaggcaatctttgcctatttggtaagtacataaagatttaaatgcctttgaatagaaaatatatggcaagctcttaggagacttttagaagggtagtagtaaggagttaatgaataactggggtgtaagacagtaatgacattttcaaggcacttaagatgtaacagcagctaaaaatattacattcatataagagcttctccaggttttcaggtttctgaggttagaaagaacttgaaaacccttcgtatgagtgagattacttaatcctgtttgcttctgggaaaaaaaaaataaaaacaagaaacaaaaaccctgcatgtacagccttgttctttgaattacccctaaacccattactattgatggtcctaaagacgtggctaaaaccaaaattgtaagataataacagaagtttaaaacatcaccatagacccaaagggaataattttacctacacactatgactaagtctgtgatactggaagatattttattagtgagtaatattaaatttttattactgtagtatcatccatatcagtggtctcaaaacactgaaaaaatattgacgtatggtagctggaacgtagaagtcaaaattagccattatttttactattcaagatacattgacatcacctggaatggttattaaaaatacagatgttagggacccctgtcccctaagattctgactcagatgccttgagagacactgatctatataaatagctgcatgttttatacggtgatcagggagactagtcacaatacagaggtgcagcatgtatgtagtcaattgcaattaaaacaaatcatgttcatttaatgtatttctttcaacccactatcaattgtcttaaaaacgtttttccttttctctgcttcttaattagcaccttttttttttcatcagaagctctattttgtggtcatattagtgctattttttttttaatctactaacgttgcaatcttcctccgaaccagatacaagactaattttctttcttgttttgaaaatgctgggcaacataatttgctgaagatgtgccagctcagatgatgagagtttatcttcttagaatgatcaatgaggataatcacttacatctaggttgggcatgactgggtctggcatgtggtctcacaggcaatgctctgcccaaacccctccatggagagggagagagtgggggctcaaatttagcaggcctgccaagccaagcactctgcagcagtactgccttccctagaggaagggctaatgtttttctgattagtcatcttagagctctgggccgccttttaggcatttagaggcccaggggtggtggtgtggatggggatttttttggattctcacaagggtagtggagtaagaaaagaaagcatttccactcctctcgcaaacatcccctttctccttttgttgtcctcgcatctcattcaaatgttttaggtctggggagcatttctggtggtacagagttgaaagcacgggacaaccttaactgaactctttggttgccactggaaggaccctgcactagagctcagcagcttcaagagctcagcagtctccaaggccagaggccagaggaccatttccttaggaggattagtgcttacaaacttcattttataactaactctctaggcctttttcttcatctccaaaatgaagaaagatgtatctccctgggctttcccaaattgaaaatttcatcttgtgaattaatttttatgatgttttttgctaaatttttaattttttaaacattatggtaaaatatatgtaacatgaaatttaccattgtaaccatttttaaatgtacagtttagtggcattaggtacattcacattgttttgcagatatcaccaccatccctctgaagaactcttttcatcctgcaaagctaaaactatgtacccctcaaaaaataatgtagcatttcttataacagcacttgtttgccaagctgccctttcactgttctgattttgttggtagggaagttagggtacagagaattttgataatacagttatgtgccatcagaaaattactactgataaatacattaaaattcttagcttctgaattttccagccaatgatttcatattgagcttcattgctttcaattcaattcacccaacttattgagtgtctactgtgtgtttaagatagactagcagtattgatcagtcaggactaaaaaaatgtggataatagtaaaagacatttaaaaggaaataggctgcaacttaatgtgttagaaggcataataagacatcatatgaatgctgaggagaacaatatggtcattgttactattaacttattttactgttatgcatttcattatattttatttccatttcctgctgctgtgctttaatcttgaaaagagctgatcatgtgtttgaggcctttcaaactttacagtgttttgttcggagagagagagagagagagagagagaacatgcacgctacagcaatctcaaactcggtcctgtttgtcccaatttcgtgcagttttctgcgcagagtactgccagacttcactgagctgatctctgttttcacaaaatagcatgtaattcaaagccactgctattccctggctaactggatgccttttttgtttgctgtctaacaaaaaagtggtgaatactctaaattcatttcatccgcattctctgttaaacttcacagaatggtactgcgcagtgggtgttctaaggtcacctgtgcagaatgcacattccatgaaatctcatggtgttgctattgccaacagtgaaggctggcccctgtcatgctaatggggatgtaaaactggtgaccattttgtatgttcaagattatggaactctgtgaaaaatgatagagcatagtgacagctcttctgtaggctgatgtaactcgggctaaattctatacctctgaagtgatcattatgccattcatggcaatatttcaggactaatatattttgaaattatgttctctctcctggtattctacataaaatgctcagagtgtatttttccccaatgagcttactgaataatcatgctaattcaaatattattttttggcacttaaaactgacttatatagtaacttaatctttcagaattaagagacatggggctatccccctaccataatatgaagttgcctaaattttattttatgggaagaagcggaatttagaaaatgtgggcctaaggaggtaaaataaatgctttttcagtaccaaaagttaaattagaattatccattaatgtgttttccaaataacagaactatatttctttgcaacaaattagcttgttaaaaagtaggaggcataaaaggttttccaaggaagactcgaaagtctagcaattgtatctaaccaccccccttcctcaaaatgtagtgctgcagaggacaaaaatgattggtaattaatgactcaagccctttatgcgatactaatcccttactatttgctaggtttcggtggttgcatgaaggatgttaaatttacacggggtgctgtcgttaacttggcatctgtgtccagcggtgctgtcagagtcaatctggatggatgcctatcaactgacagtgctgttaactgcaggggaaatgactccatcctggtttaccagggaaaagagcagagtgtttacgagggtggtctccagccttttacaggtaatgtggaggtcctctaaattaaatgttacatgtctcttattcatccccctttccctccctgccagcccctcattaatctatatgagtattattttaatcttgctgcatcttatttccatttaagaatacctgtatcgagtgatagcctcgcatgaaggaggttcagtatatagtgattggagtcgaggacgtacaacaggagcaggtaaatacttatcttcaaatgcatatgtgcacacacacacatgcatgtatttgtgcatttatataaaaggaaggactattaccctgaagcagtaatatttttgtagtcttctgacagagcatgccttggtttgaaaatacatctgtcaatggctaaaatgcttagtagatcagtgcttttcatttaccaagaattcactaaatacttgctcagacttgatcctttcctcttaggatgcagaagtaaggaaagttcaggttgtcttaaggatgtaatagtcccacctacctaacatgtctaaggataggtaacctttacagatggtgtagatagcaagaagctgaagtcagggattaggattatccttggctgggagtggcaccttcttgactttctcacagaaagcacatttgaaacctgcaactggttggaatcaggggtgtctatgacatcattgcagatgtttgccccgttgttgactattagaatcttagaatgactctcccaagagagaaattgctgattggtttaatatattttgaattggaaaagaaccaactaggagacagtatacattagacctaatctcagacaactgacttgttttgtacttctgactggccacaaaatcttttcccaaaataccaccacaggaaggcattcagcacaaagagttttgtgaatcagtgacattctactattttgggtcaaatatttgtcaggaaactgaacacatctccagatgattgccacttatgtctcagcaaggaagtttattcagcgagtatcaatttgtctaaagacgtgtttccatcaaggtattctcttatacttaatcaacagtaggttactatcccaggcatcctttgaggaatcttcttaatctaaaatataattaaatactgagatgagcaactaagaataattttcaagactctctacctacatattttccagaagaggacaacttgacacttttccaggatgatttaaattatcacctatttataggcaagacaatgagctgaacgatctcttaaaattcttttcaacttcagagctaagagaaagctccaatataaaatactcacttgttactgacatgttctctgctcctatttcacactcttctactttattaacaaatataaagcccgctttgagtataattcagcaacattaataggcgtctggaaagcacattgcttacttagcttaatagtccccattttgagtactactgagaaagtacacaaatagagctctgaatttatagcaatgatctgaccacagccctatgccataaattcatatttacaatctgaccacaacactgagcagctacatgctcccaagggttggagaataattgcactatttaattatttttgagtcagttttgctctgtcccttatgagaagaccatctgttagactgtactgtactttgccctgtaccacatttccgaactaataaaatcagcgtcactcccattgtccctttccttgcaactcgatcttgtggcctgtgtgttttctataggtgtctgtagtgttttaactgctcagagagtggttctcccctttggtgtttcctcttatcttttatgttcactttgtttcccttaaagctgtcctactttattggtctggacagtaaagtcggagaggaggagatttgatgtggaaaaaccagagtgatcctccatcgacagggctcaggagtccatgagcagctagagcaggtctctcatccatcatcctgccacggagttccttgggctctttctttgtgtccccagtgcactcagctgtgatgaagtttttactgatcagaactgtagaaatgtctaataaatagttaaaggtaatagattttttaaattagggggctcagcttgtaagtaaggttttgcagttcttttaaacttcctcattttgtgatattattttgaaatattctgcagaacaagactttgaaaatgactttgtagaatctcaaaggcaccagctcctttaccccacccccacccccaaaaactgcaactaagaatatattccatatatcatatctggtagaactttgctttttaaaaattaattagaaaaacaattgcatttggaaaatgggtctaggcattcaagtacaacacaatcacatttgtgattttttttttggctaatacatcgaagatataaaagtgtcaaactactatgtataataacagtctaattatcttgcttcaaagggggtacatcattatattgcttgaacttgttatctgcctaccatccacctccttctttatgagtgatgtttaaacatgtctgatacattaaatgtttttggaaaacctggactagacttgaaagaatgttatgtcgatggagttttgatggttttgaaatatcgcttaaactgaatggctcaagatgtgcagtcatattaaatcaatgctgaaaagttacaactctaataaattgtatttatgctaatggttgagtctgatttactgcggccattaaaagtgaagaataggagcaatagtcttctcagaactgccattttccctattttctcttttattccttcacagctccacaaagtgtgccaactccctcaagagtccgcagcttaaatggatacagcattgaggtgacctgggatgaacctgttgtcagaggtgtaattgagaagtacattctgaaagcctatagtgaggacagcacccgtccaccccgcatgccctctgccagtgctgaatttgtcaatacaagcaacctcacaggtaaatgcaatcctttaacagagtagaccctattaacttcctttttgtttgcattttaaataaaaatcttctgcaaatgttttttagaaaaatgtattaaatatacatgtattttacctgattaaaaacaacacccatctaaagtagtggaagcctgcatctacctaggataaaaaggataattctacaatgcgcatgggctctcatggataattttattctaaggtagatattctctccatcccccaaagattacatcataggtggctatagccctttaacaccttatagacatcttttggaaatcctatgtataaatacttatttcacaaagcaaaaatttactctttgggactagccccagttcataccactattatttattgtaaaattgctgattaaacctaattatctcaaggtggaggagtcttagagccccagttagttggactggcaaatcagtgaatcgatttctcacagtgtggtgtgccatgaagaatgattataatgaaatatactcatacacaccactaacacatctcacactcaaattcatgcgtgtgtattaagagcatttttcagcttcatgaaatattaaagcacatttaaagggagagtttaatttaagcctttgataaaagggaagtaaatgtgtcaaatttgacagaaaaaaaacattttcctctatcaaaaaatcctataacgtgaaccatcagaatggacgttagaaaagccttaaatattttcccaacaaacctgttggtcaattccctcaagactttacttccttctttagacactttggaatgcacagcccaaatatactaccaacttttagcaaaagaaaaacaaattcacacccttcacttctttcctattttaccctccttatcaaagcccagcctgagtaagcccacagcttgccttttcacaggttgcatatggcagctacatgggctggaaaataccaagtagtttattgctaaaaatgctcaaccccactttcagatgagcactcagtaatgacaccaaccctactgtatttccagaatagctccttcccccattctcctcattaaatattttatatttttccaaactatacacgttacctccctttctcatcccactcagctgacagcgttctattttagattatattagacaccatagaaaaaacaatttattttataggatttctattactttcttactaccaaatgtacatattaattgcatttttctgcctgatggagttgttattaggggttggatgaatgaatgcatgctaaaacacataaaaccattttgatatacaggaggtgtgtgctatgctataattttattttcattattatttttaattttcacgctttttttcctttctgttttacaaagcttctcttatcctatcaaaaatagaaatcttcacaagtcctctggaccctgactctttctgtttcttcagagatattactgatagcttatcgtcctctcacttatatttttaacgcctctgtctgctgcagtagagtatggcccaaggaccagcattactagcttcacttgggaacttattactaatgcacattctcctgccctgcccaccccacacccgccaaatcagacactctgcagtgtggctcagcagtccttgttttaacaagcccccagatacatctgatgtatgccagcatttgagaaccactgactgggtggattcttcccagggtcattcaaactcttttatctcccattgttaaaaaccaacacactaacccaaaccaatcacaaaaatcttaattctgtccaaactcccagctattgctccctctctcctcctctcggccttcgtctagcatgaagtatctaagctcattttgtcctcacttaactggcttctgctcattactttcgtgacgagcaccaaaaactgccatgtttacataggcaaaaaacacttgacactctatgtcttcaccactcttcagcattctccacagtaactctttcatcatttctagaaatatttcttcacttctgtgacttttctgcttacctcctggttctccaggggccctgttctcagtgtcctttgctcacttcttctaaagtgtgacaaaatattgaagagtctcaggatttagaactgggccgtcttctctttctctttcatttttttctggcttgctccagaagccttattgactctcataacatcaaataccagatagatgctgctattgactcctaattgtacatcccacctagacatccaaatgcctgcatccaataggcgtttggacacaatgacatttccaactggatgtctctcaccttctacccataccaaacctcaactcttgcttctcctgcattctcatagatacctccagccacccagtcaatacaatttgagagttactctggacttttcacctccttcacacctcatatccacagttgtcattctatttttcaaaatatgtgttaaggtcatccatttctcctctaatctactggccagcccaaactactaccatctttttcctggacaactgcaatacttaccttcatctttttcatagccttttttttttttttctctccctggccgtgagtgtattctacagagcatccaacatcatgtccctctcctcaaaaactttctttcttttttttttaattatactttaagttctgggatacatgtgcagaatgtgcaggcttgttacataggtatacatgtgccagggtggcttgctgcccccatcaacccggcatctacattaggtatttctcctaatgctatctctcccctacacacaccctccaccgctcgacaggccccgatatgtgatgttcccctccctatgtccatgtgttctcattgttcaattcccacttatgagtgagaactcgcagtgtttggttttctgttcctgtgttagtttgctgagaatgatggcttctagcttcatccatgttcctgcacttcctctctcacaatcacactttgtctgggtctccccctacttccagggtttccaacaattaccgttgtaattaatataatttaaagaaatttgtatgtaaatccttaggagaattcctgacaatgatgatataataaatccctagcagtggaataactgcatcgaaggcttttaagacattgtatagtcttgaactttgaagtcagacattgatataaatctctgctatataccttccctgtggataagttccacatccttctggatcctaaagtcctaacctatgaaatgggagagtgatatttacctcagaagaatattgaaaatattaagtgatatgatattctagctctaaccctttttagctgtgtagcttggacaaatcaataaacctctgtttgctttaaaatccttctaggtaaataagaatgagatacaactacatgcctcccagggcagctgtggggattaaacgaattcatatgtatgtaaagcacatagcacagtgcttgacatgtggcatgcactgtatcaaagttacctacaggatatctgtaaagtgtgtaacattatgcttaatgcttggtaatttctcaagaaatggatagcaattattattattattattactattattatttaatgaagtctcactctgtcgcccaggctgtagtgcagtggcgcaatctctgctcactgcaagctccgcctcccaggtttacgccattctcttgcctcagcctccccagtagctgggactacagacctccacgcccgggtaattttttttgtatttttagtggagacagggtttcaccatgttagccaggatggtctcgatttcctgacctcgtgattcacccaccttggcctcccaaagtgctgggattacaggcgtgagccacagtgcccggccaggatagcaatttttacactgcccaaaaagctgtacaaattatgcttccaccagcaagcagaatgcaagattgtgcatttcattttatctagccaacaccaaggtttacacttgaaaaaaattgcaaatttaaaaggcaaaatatatcagaatattgttttagtttgtatttatgtgattactagagagattagttttttaatatttattgaccatttctacttcttttatgatgtgcctaggtaggtccattgttttttattttttattttattttatttttttattttttgagacagggtctcactctgtcacccaggttggagtgcagtggtgcaatctcagctcactgcaaactctgcctcctgagttcaagagattttcctgccttggcctcccaagtagctgggatttcaggtgtgcatcaccacgccagggtaacttttgtatttttagtagagatggagtttcaccatgttggccaggctggtctcgaactcctgacctcaggtgatccaccagccttggcctcccaaagttctgggattacaggcatgagccactgcacccagctgcattgctaatttttctattgaatgattcacattttctcattaaagtttttctctgcatatgaagaataatatacatgtttatctcatctaatgcaactcccccagttttgtcattttttaaaaaattttgatttgcatttttgtgtagagatttaaaaaatattttatgtagttaatataacacccttaaaatgttcaatattctatgtgtgattttttaaaaatatatattccccatttagggttgattattgtttatgttagatataccatattgataacatataatgcatattcctcaaaatagtaattctaaggttaggataagaacaaatcagaaactggatgcagggaggcttttcaaattaaatcagcctctcccaagattctgaaggataccttcttgaaggcgagatcccacagattgtaaaccaatgtagggcagtactggatgttactcaaaaggcatgtcatacatggtagtgatgtatagggagaagaaaatcagaaaactgttgagcaattgttatttatttttatatatcaaatttgtcacaaactaagggaagagttaactatgttaactatgcatgcagttttgtcaatttctctgagatttttttgtttgaattttttgagtttttattacttttacacttattatttatgttttaaccttcaaagtctcattgctttaggtacagtcatgcattgctaaaggatggatatgttctgagaaatgtgtcattaggagatttcatcaccttgcaatgtgcttacataaacctagatgacatagcctactccacacctaggctagatggtgtagcctattgttcctgggctgcaaacctgcacagcatgttactctattgaatagtgtagggaactataactcaatggtaagtatttgtgtatctaaacagatcaaaacacagaaaaggtatagtaaaaacactgcatggtaatcttatgggaccaccatcctatatgttgtctgttgttgaccaaaacattatgtagcacatgaccacatggcagcaacttggctaacatcctttaattcaacattgttttcttataagtttgatgagaaaattaaaaaaaaaaaaacaatccctagcaagggccactctctgcatggaattttcacattttccccatgtttttgtgggttttctctgggtactccagtttcctctcacatcccaaaggttttccccttacatgaattgagttgtctacgtgaccccagagtgagtgagtgcaggtgtgtatgagtatgccctgtgatggtatggtggcctgtccagggctgattcctaccttgagccctgagctgccaggatgggctccagccacccacaaccctaaagtggaataagcagattggaaaataaatgaatgagtaaatagaaatcattataaaataaaaattcataaagtctatgataatcatacagatgcacagcaataaacaattcagtatgacagggctcagcaagctgcccagtctgtgattgctggggtttgaacttcatgctggtaggcggtgctccttacaatgttcacttggaaagcatttattccttgatttatataccacaccactgtcactcactgattcaccaaaacttgagtaaatcattatttcgttttgattaatcttttgtaaatgcatgtatagcacacattcatttcaatgtttaatattagtagtctatagaaatttggtgatgttttgtgaccagaaatatgccataggatcttaattcttttttacatcaattagcctgtgggaaaattgggtttgttgtatatcatttcacttaaaagtgatagtttacaaaaaattccaatgacattaagtgaagacttctatatatctctgcagttttagttttatctttcacttgagattctctgtatttaagtacgggagtcactcattcatacttgtttttataattgatataattggtcttctctctgccatcatgttttatgctttccagttttattatttcttgttttttagtgattttttcactacatttcttgccaatgtgtactatgaattctttgattttttttctttcaaggagtttgcttctctcaatgctaaattgagtcatcaaggacataggtagaaggtaatcttaaagactaagaagaactccagtattgccaggtggacttttcattgtgaagactcaggataatgaggagggaatgtgaattgagagtcaccaaagccagcttggataattatcaaagtcagagaatttcccagtaaacaaaaggaatactaggaagtgagatggaaggagctgataaagcagagagccagaaagctggatttggtggagacgttaggggtgcagagattgttttgaggcagctgttttgccagttggttgagaaaccaaggtaccaaaagagagaaaaatcggtgaagcctatataaacagttttgctattgagcagttttgctactgatcttgaaaataacccttatttagcatttctgaggtgacttttgttgagattttaatatttaagttaattttggttgttagagtcatatttaaataaaataattctgacactgaatgtacaaggcaatttcgctttattagttagcgtagggttctttaccaattaagtttaaaaaatgctaatcagaaaatgtgctgttttatttcattaattttttgttgtataataagctcttttattcttcagatttgggtctttcttcagcttggaaaatttgccattgtgtttatgatcattacttctggtgagaaatagcaattttcaatattgtatatttcttcctaggttgtcttcctcattttagtagttcagaacacggcttgtagagtcaaatcaatctaaggtcaaattccgcctatgccactttttagctgtgtgatctcagacaaatttaaaaacatatccttacattggagtttcctcattcataaattggggatgaaaaccttatttatattatggaactgctataaagattaaaatgagttatgtaaaatattttgctcagaaacaggcacatagtgagtgttcaatgaattcatagttacctttataatctctgaattacagtttctgatttctgggttattgtcccataattgtttttatttccattttctgatttttgcactgttgattctgctctttgaaacttctaagatgatttttaattcttctagttcagtctttgatatgatctgcctttttcctcatctagcttgctttgatttctgcctgcctcttgaaattctcaatttttgtcttcatctcttgtttactgcttaccttctgtctcttacttagtggattccaagttattttagatctaattaatggcatgcaactcgtgatttttaaattttacaagtttcttgaattaaatcctccccagaatatgacaatcttccataatttgagggctatatccttatccttctttcaagttacaatttttccatcagctaaatgtcctcccccaaactcaactccatagtttagttggctcatctctaatataaccttctgactgggtgtttgcatgggaaaattaaactgttttcaaatcatcttactgggcatccagttgctgttaataaaagcctttgctaagatgatgacagggttagtggggtaagtttgcattagccgcgcagccaccctacagtttcagcttctttcttcccagtgtttggtagagtaggagtgctgagagcttgctggcattttgcttccagtttaagtttgggtttgcctaggactttccttctaacagtccattgtctctgcctggtctcgttttaggtatttataaaactttggtcgtttcactgggattcttacaaggtggtagttcaaaactatagctgtatactgagtcaactggggagctttaaaaaatatactgatggctgtgtgccccacatgcaaaatgtctgattaaattggcctggaatgtggcctggacatttgtacttttaaattatctcaggtaattctgctgtacagccagcacagggaaactctatttaaaggaggagtttgtcaccagtgatcacatttaaattttatccagatattcttataactttcatttccccactgaaactcaaaaatgttaggaaataaaaaactaaatgtatataaaaaataataagctattaaaagtaaatagaaaatactagcaaaggaatatcataagatgacaaaaattaagtgtaatagttattgggaagtgggattttatgttcagacttacaaaaagcagaaggtaaaagcaaagaaaattattaaaaatgaatatcaactaagataactgaagaaaacagaatagtgaagcagaatatttaccattcatgaatttgtctatcagaggattaaatgagataaatcccagttgcaatggagagtccaagggttaacaggcccgctcaggagcaaatgggcccctttgggccacagggtctagattctgtgccctcccaaggccaaggttcagagcaaggagttctttaaggttcattccctcagccagagcctcagggtagaaaacccttcagttatcactcctgtgtatctttagatttgttgaaagggctccaattaactctgggtagcttttgctgatttttcctgcagccctgttaacatgcaaagctgcagcccagagagacaggactggcgtttcccctcaaactgaggactgctcagaaactgacttcataatttgatttgaaattatttcaagaatgaatggattcaagacttcgcacatatacgaattattttttccgtaaggtgtttaaacatgtaaacttaattatcagcataattactacagcacctggcatcaagtgttacagatataattggtgtatacaaaatattttctcaattttattgttgcattacattgagctaaagtctaggggttatattgcttcttcaggtaaaatgataaataatagtaatatttcttactatttgctatagtttggcaaatgaatcaataatgataagaataatcttccagatgactcacatatatctacatttatgtaaagaaaaagacattttaatttataacacaaataataatatagcttttgccactaaaattgtttcagtctttacatacaatggacttaatttttttacctgaatgaagtgggtttcatactgaaaatctgcctctaatttttgcctcttttacatggctactgtaataattagtgactctcaattctactggtcataaggtgattctcagattacttataaaatgcagatttgggggtcactcacacatgattctgtacatctgggctagtatttagcaatttgcattttacctaatgctccaattgtatttttggaaggtttatgaaccacatattgaaagacactagtgtagaggagtggtcagcttagactggaatactttcacctgctaggcttgcaactatccctgctttattcctgcttctggttctgactgtgttagctttgctgccagaaaaatgccaaggcaagtgaagaaagagaggcagtgtcagtaggacccctgaaccccagtaggactcctgaacttctgaaaattcccagaagaaagaaagtaagaattggggatcttgataacatggattctgattcactaggtctgggaatatggtgttagattctgcatttccaaccagccccctcccactctgtcatgccccatatagaaaggcaaggagctcactatttatatgggaaatggaaaacaacaacaacaacaacaaagaaaaaacagtaaaataaaacaaaacccaattctcaattacaagatgccccttaggttcatataaaagtgagagcagtataattcaatgtaggaattatcattgcaatgtcttggtagagccttgcctgcatgcatttaagttacaaacattcaactacatattttggaaatgggtaagggatggaggaaaaagtaaaaaagcaaaaattaaacaaaacaaaaacctataaaaatagtgtcataggcaaaggatgctatccagtatggaaaatgtcaacatctgttagctggaaagaatgtttgaataattttagggtttcccagtcattgacaaagaagtgatactcattgtttgggtgtctacaaaaagaatgaagacttcagagccctgaagaatcattgatttctgaagagttagaggcatacacaaaaccaaatgtactatactttatgggccatataaagagttgtcaagggaactttaaatcacgttatttttgccttatgcctgattttggaacttaaactcagctatgcagagtatcatcagtaagattaaattaaattaaaatgctactctatatatgtatgtatatgtgtatgttatgtacgttcatatattatataaatatgctctctctctatatatgtattctctctatatatatgtaaccatacttacctgagaagtctgcagagaaatgactgtaattcaacgccgtgaaatttttttttctattcaactgaaagttcttactccatagttgctaaaactgcctatggtactctctgtgcacccatgctatttcttcaatagacaataagctcctggaggacaagtttcatgtttcatatttattttaagcctcgttcactaccttgctcaaggtaagtgattaatatacttatcttaaaagaatgaatgaaggaatctttcaattagcaaatgtagctttctgctactaaccccatagttaacctaatgttaatatttttttgtgctgagttggactgagtattgaactactagtccttactaaagtctcctcagtcttttatcaacagttctttaattttatagaagaatgcacagagctatcacaacttaaatgtatatttggaacttaatacacatttcccaatagaaaaaaaatatgttggtagggtaagactaataaataactaataaagactaattccaaaacttagacctcagaatagaacccaaccactacatatttgaaatgaaaaataatggaagccaatactgctgcaatgctgataattataaagaacagaaaatattcatttatttaaaaaagtgatctaccacgttccatgctagtgctaggccctatcattgtaacatgatttttataacactaaaatatagcccaagcactctctctgaagtataagattatgtagacaatgaaagttttatagggaaaacctaacagagatgggtttatcatttttaattcattatttcacttgagatactgagaacctaaaataatagcgatgaagtttttctctcactggtaataggtgtccacagtaagtcaatgcagaggcgggatgttcataggcgagacccacacacttcatctttttgctgtgtcatccttatggacaaggcttctacctcatagttcaagatgactgcttgagctcctgccatccagtctgattttcacccaacaggaagaaataatggttaaagaatactcacattcactttaaagacatattttagaagttgttcctccacctctggttatcttgcgtggccagaacttagtcacatggctgtacctagcttcagggaatgttgaaaaatgctgtctttattccaagtagccacttgcccaggtaaaaagtgtttttattttactgaggaaaaggagtataatacataataaggagcaattagtaatctttgccacaataggaaatcgtcagaagtaaataaaaagtaattctttttgttggtgttattaaagataaaagccagtttttatagtagaccataaattaatattccaatatttgtagtttattacgaacttttttttttaatttgagatggaatcttgctctgttgccgaggctggagtgcattggcaccatctcagctcactgcaacctgcgccgcccgggttcaagcaattctcctgtctcagcttcccaagtagctgggactacaggtgcatgccaacacatctgttttttgttttttgttttttttgtttttgtttttgttgttggtatttttagtagagatgggatttcactatattggtcaggctgatctcaaactcctgacctcaggtgatccacctgcttcagcctcccaaagtgctggcattacaggctacaaaatatttctttaaatgtaaatcttgaaagaaactggtctgaaaaaattcacaggacgaaaatatggcctatgacataaatagtaaaaatagaaatgatgtaatgttcctgcttagctaatgtagaaagatttcattaggtaatgcagtgttgatgagttaatagctttgtctaactctcctgaatacataatgtgcctgaactactggtacattgtgaaatcttcagagagagttgttttttaaaaaaaaaagtttttcattttattttatgcaataagaattgacaccaaaggatttgcatttctttttggtaacatgttgagccgtagttaaaaatgatgaaaatatataacttttgttctacagtgataatcaactaggcatgtccacaatgcttataaacattcaatacaaatacttcaaggttatcaatcatagttgataaagaagaagaatgcacagccagacttttctgttttctaccttttatgatcattttatatttgtgttatatttggaacaaattaaaagggttatatgtataataaacaaaggtccaatattgaacccaatctctctctctcacacacacacacacacacacaaatgcacacatagaatttcttataaatcagtcatttttgtaaaggaatattacaggcatacaaacttgctcattttggaggacaagacttctaatttctgtttgtaagcaataggtgtcagtaataaatttgaacctcttaacacattttaaggtgcattttaaataagatattttatagtaaaaagtgtgctattattgtttttaattaccatttttcaacacttttttcttgtttgtggaactggagcttaggtcaaatgggaggagtaatgatcttggggtcagaatacaggttctaatattggctctactgctttttagctgtctggacttgagcaccatacagtacactcactccaaaagcagcctcctctgtacaatggaataacaatatcagaggcttgtagcaggggaccttggacactgatcataagggatgactttcatttctctttcttttcttttcctcttgtctccttgcctgtctctctgcttagtcaggtccagtgttttcttgaagagtttcagtaatttcagtgtgagacctttatgtaaggtaaagagttaacacaagcacgtggcttcaaacttattggcaaattagaataaaaatggcaaagactctgtagttcttaccacaaaggcattgattaaaaatttgaggttagaggtaaacctgctgagagaatcttaactggataatactttgaggtcaattaaaatcactgtttaaaccgtcctctaagactgggattagaccacatattttataaagaaataaagaataatgtttttcctgtttgtaagaatcaacatctgcatagtctttgataggtatatgatattctatgctctctaccaaaagttttaaacaaggtcaaaaaacccatttgaaggaaattaaatgtaagaaaaattagttttgaagtttccaagggattaccttaggtttgggttaagtgtatttattgttccaccttttgggtaaaatgcaaattgactttccctttgtaaatattagaagtccttatttttattgaaaatattatccaaaaacaacaataacaaatcccaccctcctgggctaagaaccagaggagaagcatcctggatatgtttccagatctctattagatagttaagttttcatccatatttaacaaatgtcattattcagtttcatgggatcactgtgtcaaaatgtctgtgttagaactttattttcagaggttcctttaagtggtcaggaagcatggcatattggattgattactctctttaatccatccactgggttggtttgggatgtatacttaaaaattagattttatcagcactgcagcgggatcctcagccagaagtctcttcttctgccctccttcccctagccagttttcttttaaaaagtgggctcttccattatgtctccaggtagcagtagcagctctgcctgtgtggcatcccttaccagatggccctcttaataaatgtcttgctcttgcccaccctcactttcttgatccaaatgtgaaatgccagcaaataaataagagcattgtactctgatgagttctcttgagatgggggaaaaccctggggagaggaagctagaaacagcttttctgtttgctgtgactgctcctaattactggccagtagtagaagatatcatttagatgcagtagaatataaagataaagaaaaaaaaatgagagataaattctccatgttatcccaaatgcctttgctaacgtggaaatactcttggattgttggagtgcatttgaaatattgtgcatgatccttacaaggggacccctgactttggactcagggtagacagttgctgcatgcagatttcaccgccagactaaaagtgcaacggaaatgagtgggtgatgagagcagagcagccagttctttaattgaattaaaagctgggtgacatcaatgcagacacctgtccaattacagacaggccaaggtgtttaccattgctgtacaagcgattcgaagatgacagaaatctttccgcccacagattaacataatgaaggagaacagattacagtggatgccggccaaacaccttggttggcagctgggggtggggtgggggagggaggaggagtctgctgaagtatgtaagtagaaacggagtccttttttcttctctgaaatatgctcggctttaaaaaggatccattttgctttgtgtcttaggctcggtttccaggcagagcatttatacttgtctgcatttagtcagaggagttaatcataaaatttcaacgtgaaagcagactcctctgttgttttgctgcttctcagcatacggtgtcccattagaggtgcaaaagcttgcagagctggtgtcagctccacaatgattttgtcttaggtcgtcaggctgcctccaattattaatatttttctttggctcctttgaaacttgaggttacagcaaaggaaagagagtgttggagataataatgtatcagtcaaaagaaacaatgtctgtcactttgcttgttccctggaaggggcgtggtgggagtcaggctctcctatagtgagagaaatagccgagtggagctaacagtctgcaaaatcttaattttcagtcacccgtcaagtgctaacttttggtaaaccatactaatagctgctgggatagaggataaggaaagcagtaaaaggctatgccctctgtgttcaaggaattcccaaatcactgtgaaggacttctaagttgcaagttctctaggccaatgctcttcccctctgttaagtggaaaccctgagtgcacagagtttggagccatatgcagtaggcctcttaacctatctacggtgatgagtttccttcccttaaatcaagtccctgccccctgatctttcagcttgggctttctgcacccactgtggcccacaggacttcaattcaaagggaatctacttacttgacttcaaactcccttggtgtggcatgtcaggatttctcaatgttaggcattaatgcaaaatgcattatcgcttagcagtgagagttatggtcctgctggtgccaatgattttaatccggatacccacgctcctgtgtttcatgggatactaacacttttaagacatcaataatgcttactttatgcttattgaatgtttcttcagcttgccctcttccattacctagagggactagcaggtttcctgacatgattgggaccattttctgatttcacagagtttgtggctgaaaggcagtttgcgaggtcatctggcctgccttgtaatagggacactctcaaaaaaaaaaaaaaaaaaaagacttctctgggatgtgtcccaaacaaagagattcacaaccaaaccaattttaaagttctccctttcaggatatacttcttcagtataaaaaccccaagtgtcacaagtatcataaaaggcaactaccgcattttctatttttgggctttctgtctaggattcctttagatatgtcaattctctatttcccagtattctttttaatataataccaaaatatatatttaaattaaatttaggcttcctattatcttgaactggtaagtctgaatcttataaatgtcattgtctacttggcccgtatgcaaacattcttctttatgtatcaatctgttactgtaagaattcttctagttccaatattttcttatgttagaaaccttgtaaaaatcagttgtattctatagcaccttttccagacgcatatagcggaaacattgataaatgctttttgatgatgatatatcttcagagtaacactgtattttccagagagtacctaatctaagtagaaccctgacacttaaagcaaagccattaggataaccactcaatgatctcaaaggatatatccacaatctacatagtcttggagagaatgtgttactctctttctttggccatggcacaacttttcaacttgaatccatcctggtgaacactacttactgagaatcaaaggagataaaccacgtgtctccaacaataaaatgaccttgtcttgattccaagtgaatgaagaccacatatttgaccagccccttgcccttgcataacccttaatttttaacctgacaggaggagaaagcacagtgaaccattatagtgttcttcttcctgaagtaggtaattctaactgcctttaaggaaaattatcagttggtttgacaaactttgtctctgacacacagcatgatgaacaagattccctactggaaatagaaaagaaatggcactccagccttagaaaatgcagcacattttttgaaagtgtgatttacaagccatctaaaaccttccatctttgatccaaagttggcaagaaccaaaacatcagctttcttctttttctttctttttttttttttttcctttgttttctatttttcagctctcatttctcagggcttattattgtttcaccgggcttgaaatgggaaatgtgagcactttgataaatggcttgaaagatgatctagtttctctccagcatctttctttaagagtctcagggtttttctatgaaatacaatacaatttggtaaagatctctaccaaatcaaagctgaagaagcaagtttgctgagatgagcagtgcttgcttttaaggtccttaaaataaggagtggctaaaattaataaaagactctcactatacacatgttatacacaacgtaactcctttagtgaagacaagaaacattaaataaaacactaaagatcacttagtgagttgtgaactcaggatctggtttgatacaatccctctgaaagtctatagaatacccttccttataacttgatgtaacaattaaaatttcaacatttcactctagttatgatttggaaagaaatgtcttagtataaggaattttataaagccaggctgtaaaattgtacaatcatagagctgcttttatatttctcaatgataatacttcctgaatgtacaacacatcttcatgctaatgattgcagataaccaacctgtatatcagcattgtttctttttgggcatggtgttcctatgcctcagctgaagcatgctcatctatgaagggtgctgcttttcacatatgccccataggttaagtgatgataaagggaaactagcctcatattccaacatgcttttccttattgacattaggattaaaagtcttattctctgggggctgattcatttcttgttagcatggcgttatactaattcagccatgcaagtcatcttatttagaatcttacggtagtttccaacttggcaataggaaagacatggcaaatgccaaagatttgctaaagatagaatggctaaaacacattttatgatgataactttagttttgagcctggaatttgggtatcgtggtggaggcattacaaaatggaaaaatgaagcttacataattatttagaatgttgattcttggttggggcacgttgagtatgaaataccagtgggacatccaggtgtggttacatggcctgcagatagaaacccagaaccagggcttgggagagatgtgaagtctgtagatacaaatgtgatcactgaaagataaggcttaataagctagcaaaggcgagtgtttagaaaaagaaagaagcttgacaacaacccaatcttgagaaacaaaagctatttaagagactgtgagaggaacatgagtcagtaaaggaaacaaaggagttctcggtagtttaggagaacaactaaaaagttcaatgtcacagaaggaagttgagggaggataaggactgaggaagggctatttgatttggtatttaagggatcactgctgatctttaaaagatacaaagcgtcggccggccgggcacagtggctcacgcctgtaatcccagcactttgggaggccgaggcgggtggatcacgaggtcaggagatcgagaccatcctggctaacacggtgaaaccccatctctactaaaaatacaaaaaaattagccgggcgtggtggcgggcgcctgtagtcccagctactgtggaggctgaggcaggagaatggctccaacccgggaggcagagcttgcagtgagccgagatcgcaccacagcactccagcctgggcaactgagcgagactctgtctcaaaaaaaaaaaaaaaaaagaaagaaagaaagaaagaaagaaagaaagaaagaaagaaagaaaaagatacaaattgtctagtagcatgtagaggcagaaactgagttgcaatggtagcctaaattggaatggcatagctctgcactagagctcttgactggcaatactccatgtaagtattctaaagtcctgaacttgttcagtcttaatactaaccctttgaggtaagtactatattatccccatctcacatgtgaggcctgcaaggcctttccttcaagaccgagattattattatctgtttacagactaggaaactaaggcacagaagtctgaacaacttgcccatgtacatatggccaatcggcagcagatttggcatttggagccagcaatctggcttgagcatgggtgcccatttccccactactccattatgaagatgtgcatgtgataatgttagcttgcttttaagccatttggtggaaggagaaataacttcttaaaagaaagtaaactcagaacgtaggtcatgatctgggagatttaacaggaaatgacaatcgcaggggcaggaatgagagaaagcaggaggttctgacacgagagggttttgaaattagagagagctgaatttggcatgagatggtcacacatgtgtgtatattagttcgttggcttgctgtcttctttggccatgagctaagatgacggtgccaagtggatgaatattttcatgtagaagcatggcagacaggattcagtagcccacggagatgcctgggtcgttgctggaatgaagacttagagacagccctaggaactaagggcaagtgggaggtgtcaaagcaaagaactggtctttgctccatcctggcttgttgatcttttaattctttaaattttctactggggagggaaattatggaaacatgtatattaaaatttgtgtttgaatgatgaaagctgtcatcaaaattggcaccttaaagcaataatgtattctctgagcgattgaaggtttcatcaataaagagacaccacgagtggggccatctttttataaaaatagtcataatctatgtggttaggattaaagattgctctgaaaaacgtctttgcggaaaaacagtggtgagcaaaagcacaagttatattttggattttttttaattcacaggattaactaaataaggagtctctgccttgcttatgaacactagtaaacaaaatgtgttttcatttctacacatacttttaattgctgaacaaatctcatatatctaccagcaagccatgttaattcaatacttccacgtgtaacacttccgtttaagacaggtgtcttaattaaataaactaataattttgcaagtagaagtacaaaagcataattatctaatttgctaattgttcaactatgttaatttgcatacttgttagctacaacataaacaaatggtttgtatatgtatcgcctactgttaaaataatgaagccactcttgggagtagcatttttaaagtgtgttaataggtgccctataaaaaggactccttagttaaatacggttgaaaaatgctaggttaaagaaaattaaatagttttgtttctgcaggaggtctaggatcctggaatgagataatatatatcttagctattggaaacattgtgctctgcctcacgaactatatgtggaaccccctccccattttaatgggagaaacatcagatgctgtttgagagctgttttaacaataagttggtctcacaattttttctcatgagtccttccattcaacaatcagcagaaagggaggaaaatgactgaaagaggaatatgtttttgatttctgtctctggtctctttgtttttgtctctctctcttatagacacacacacagatatacacacaatgctctttattgatgcttatggtaaacacgcaaccctcttttgtccctttttattataggcatattgacaggcttgctacccttcaaaaactatgcagtaaccctaactgcttgcactttggctggctgtactgagagctcacatgcattgaacatctctactccacaagaaggtaaagtaatttcaaaggtcttgacttccacatttcagtcatgaataataaaataggagaagagctaaatgctacaaggccatttgctggcaaaccccaacctaatttgatgacaaagtgcattgccaggccataattgctccattttttgggggggtgcgaaaatgaatcaaactccataccctttaatgacatgcatctttaatagctgtaatgcagattaatgggctttttaattgctgttacattgttcatgcaagagccttgtcattaatatgaagcatctgaaagattaatgaaagcttcctcattttactatggctcagaagtaaatctagagacagtctgactaaaaagaattgattgtatggcacagtatgaaattgagaatcaaacggttgatttccatggtcttttttaactgctaaacagcagcacaggcaacaattatttcagtatgatgaaacctccaaatgccaattgaggcattattaatcactgcttagttccttccaacttaagtctcacttctgttgtacttggaacttacaaactgttggcataaattaaggtttcagaaagcatatgttaagaaggcagtgagaaagagaaaatattttagcacgccaaagtgaaagctttgctcaagcatcagaatgcatcacttcaagaaataacagctctcaaaacatttgaagcattgttacttcatatttctctattctggataagaggaattgtacatatcttatactgtctagttgaaaagttctttaggagatttaaacgcttgatctttagggaaaaagagtcagccagtctttctctctctctctttcccagtatctatatattccccccttcctcttttaaaccctttaccaagcaccacttgcactgaagatatgtaacagaaaggaagacatggacccataggatgaaaccaggacaggataaatgactttgtaaaatccttcttgtgacccttaatatgctgtattttttacctaaaccaatcagactcccctcacctgaactatgctgtcagtgacccagcctcagcattttctccatctggtctactggtaatagcactgtttttgttgtatcattgcatctgctgaggacatgattatcatcccctcttacaaggactttgaccagcctcaatatgggacaaatggccctatgttgcattattttctccgtatccactaaatcctttgtccagggtttacctggtacccttcataccaatttcaagctaagccccagagagatccctgctcttgtttatatttccttttttatttttaaagacattcccaaacttctaaatatccacgaagtaattctgaatttactaaatgatagaggagtttaggaaaatttaaaaaaaatgtttagttcttaggaccccccaattcattgacaactatataaaatacacagctctttttaaaaaaatatgcactaaagttttcatatgtaattgactaatttggttatgcgagctctggcaattcttatcattacatataggtttttaaaaatttatattatgaaccacattcaccagcattactcatctcagatcacaagctccttgaggctaggggactctatctgcttaatttgctttaataggtacagtcccacatagagattatgggttaatagtacttttggtggagtaacacaagcatcagtcaagtgaactagtgtaagtactcctcatccatcattgacacaaattctcataaatgtgggacagttatttaacactgttcctaaagcaattactgacaagctgcccacgaatcgggaatatttccatgcatgggatttcaggtttattccatgatttattggtttgggtctgaaaagtttgaattagaaaagtaaactaaaattagactctataaatcttttcttccacagccccacaagaggttcagccaccagtagccaaatcccttcccagttctttgctgctctcctggaacccacccaaaaaggcaaatggtattataactcagtactgtttatacatggatgggaggctgatctattcaggcagtgaggagaactacacagtcacaggtaagacctctagagttatcagcgaattgttatagtctatattcaaatataaacatacatatagttggctctcgatatccaggggttccatatctgcaaatttaatcaagaatgcttaggaaatatgtgaaaaaaataacaacagaacaattaaaaataatataaattctaaaaacatagtataacaactatttacatagcatttacattgtattaggtattctaaggaatctagagatgatttaaagcatacaggaggatgtggatagcctatatgcaaataatacaccacattgtaacagggacttgagcatccatgaattttggtatcagtagagggtcctggaaccaatctctcactgatattgaggagtgactgcacacacacacacacacacacacacacacacacacacacacacaccagataaatagagtctatagttatctgaaaatgtgtttttgaaattgggttgcttatttttatctcctgttaatcactccaattgtatgatcttgaaggtcatattagattcatggtgaaactgaagctaaaaaaatatggaaaagtgctcatgttacctccctccacccagggctgtcctactgtgtgttctcttctatagagcccaccaccccttacctaaatccttctagcaattacctttgctcagatgcagaggaggcctggaaatgcacaaatgtgctaagcacaaagagctcagcacatgacttctctgacttcagcagaccacaaggattgaaattgggagccagtgttttcccagtcaggctcacagtgtccagttggatcaatgacatcatcaaataaatgcctctctcacatgagctattagagtggtgcaaaagtagttgtggtttttgccattgacagtaattacttctgtaccacacgaatactttaaaatcctcactaatgtgtaatagtcttaagactcagaagtgtgactcagtgtggtttgaattttagatcttagaggaaacatagtatatctgcccatatcatattataaagtgtgatgatactgaaattaaatgaagtaaattcttgaaaaactttctaaatacagaagacttgcattatgtatgctgcctgtactgtgtttatatttgtattatacttatagtggttttgtatttcatattattttatatactgtatgtgactctcatgtgagacattattaatcaaatgttgactgatgaaaaaaccaaggcctagagatattaacttcttcataaaggtcataacaagttagagtcagaggtaggatgaattatttatgtattcactcactcacattaatgccaggtactaaggttgtaatagggaactggccagatactgtccctcttctcttggtgctcacagcttcatgggggcacatgtagatgctggagcaagtcgtgtggacagggctgtgtattcatccagttgcattctcaggtttacatttttttggcccccctctagtctgagaaccttaaaaggacaagaacaattacttttatattttattattcataattggatagaattccataatatttattctacaacataggtattattttacaccccaattttacaagtgaagaaactgagggaaagaaggattaagtaacccaaggtcacacagcttgagtcggaggctttggtactaacccaagcattccggctgtgttgaagaatgtggtcttaaaaacaagtgttttaacttgtcttagtttctgaatttgtaaaatggtgttaattacattttccagtattttaaagagaattagaactatatataaaatataacatgtcattagcaattggtaaagagaagttataattgttatctcctgtacaacacagagttcattgtaaaaactgaataggttaatcttactccaacagtatcttatggcatgattttaactaaaaattataaaccacagaagttatttcagaaaaaattaaatcacaccatggaaggaactttacatatattacatctttgaacctttacatatattacatttttacatatattacatctttgatgtaacatattaataattaacatacaaagcacttctgtgaccaagaggtaacattgcatgtaatgggatatcataacttttagaaccagaatagacatgtcctctgagaatccttttgctccccacgtgtgacacaggtatgccccgtatgcttactgattacctttatattacatcgctgctttttgtttgtgtcatcttgaataggactgtttgtttgttcatcggtttgccctgctgaaccataatgatcattaaggacacaactatatttgtttttttcattactgcatctcttggacctatcacagagtgggaatggaataaaaagtgttagagtgaaagaatgaagtcagatgattcctgggaataaaaacaagaagatagcaaaggggaactgatggaggataggattagggtaggaataaggcaatagagaagagagaaaaatggaaaagatacagccaggggaagagaaactaagaccccttccatgcgcctaaacgaaagctgcatcagtccacagggaagtggtgcagctaatggcaggtctcaaactgtgggccttgactctttccaaaatgtacagaactccatatgaggttacactggacaaaaccggaaaaagggcagtgtagggagaggaggaagaattcacatcaatttctaataccacctgcaaaatgacactgaattctgtattttgtttgtttgaattatcaagaacgccatgtgactataggccctgaagaaagattgtggtaaatggcaccatagtgtattattacaatagaagccccaaatataaagaaagtgaaatatttttaaagtgcctacatccatggtaatagattgattcttcaatggttttctatctttatgtaatattttaaagaatatatctccaatactacccatagcatttttttttctgctgtagctttcttggcatttcataagcaactatgttccttgttgctttcatctccaaatagtttaagatatgaagcatattgggactgcaatgctggtcaaggaggggaaataaactgagaaagttaatatggggttcaaagatgcacatgattattctaactttatagctagaaaaactgagacctagatgggttaagaaactctagtcagtaatcagaggaactaattcaaatgtagatctgtctggccccaaatcctctgcttttaatttctatacattctgcttgttgctcatattttattttcccttgccagaactctaaaagaaagaccccagaacacctgtattagtctgctagggctgccatgtcaaaataacaaaactgggtgactttaatagaaaagtatttctcacagtctggaggctgaaagtccgagaccaagatgttggcaagcttgatttgtcctgagtctctttccgtggcttgcagatagtggcctcctcactgtaggtgcacatggactttctttcaggtgacttcatccttggtattttttcctcttcctctgaggatgccagtcctattggatgaggttcccactcttacgaccacagattttatatcagtgatatggactaagttcaggtcatttatatttttaaagtttagctatctacagagactctcagagaagactaaataggaaagggactctgtctgtctgaagtcagcaagggagaaggctgtggagaaactgatctagccattgggatgggctttagcttctatgggcagtttaagtctacaccataacatgtatctatctacaatgctattggtacttactgcttgtctttgtgtcagggtatttgtgacatagtatcttttccacactgagtggcttgtgggtagaacttctattcatgatgtctggtgatttcaataatagtgtcagtttaggtctactaaagtggatctgtatagagctgaaatatctcttcatagagaaaccgagaagtggaatacagagtttactagatagggaaaataattgataatatctttaattataaaagtgataaattcttacagaagataatttaaaacatgcagacaagtaatacctgagaatcctgtcatattgaaactcataatatttgatggaattccttctactactttattcatgttaacaaaattgagctataacctatgtatgatattgaatacatattcccttattatattatgactatatcctatcattaaacatttttgtaaaaatattttgaaatgttttgaataacattatattccatctcatatagcatataatggatatttattaatgcatttaaccatttgagcaatagtatctaatctatctctattttaaatatcttgacatagatattcttatacataaatctttatttgctaggttcctagaagaatagctaaatcaaaggtaatgaacatttgcagaatgtttggtatagtttgtcacattattccaggaaagttgtcagcagtgaattttatattcttaaatatttgattattttacaaaaaaaaaagttattttattttaatttgcattttaaagtactagttatagtgaatacttttctgaataattattaaccttttatattttcctttcattcatctaatcacattcttgatgagcaaaaatttaattggggtaaggaataattttgagacttctccacgagctatcctgttttttctggttacaatcacccacactgtttaaaatgttttaccctctacaatatcagaaacttccctactaacttggtttaatgtcccctcctaaatattcaaagtgtcaacaatttttttctcactcctacttcatttacttgtagtttccctttaggtttccatatagaatcgacattcttcccgtagggtttgccagtggatcttgctgccatggggggcacaagcaaagtaaatgcatttcaattcagaagccacttagcatccaggtggcttggatttttttttcttctttttcttaaatatgaagcattaaaagtcaaaggcattgctgcaccttgagttagtacaaaatttattttaaaatgcatacagttcaaattttttaccttgcataggccataagctagtagtatggtgggtcagttctgacactgaaaaatgaatccagttagagaacctcccgaaggctgttgatgtttgctataataaatagcacacactttaagtcaaactttttcattctgtattcaaaggtaatggatttttcgtaaccatagtaaccttggtgtattctggataaatacgtgaggtatatacattctagttttatttttgaatataaactaccacattatgtattactaataatatgaaaaataggatgtaggttagtataatgacagcttaaactagtatgcattttccttctgcaaaaaataaatatttatcaaaagtataggttcaattaatttttctcccagttttgtggtattctggtggtgccatttatctttttttccaagatctccattaatctcttatttctgtcccataacagatttttaagaattttgaggtaaaaacaattgtactttaaagcttatgattaaaaacataatcgaaagattgaaggacctatattgatatcactagcagagctattgtgggccacttaagatgtgtgtatacagtacattcccaaacaagtagacaaaagaaatccttcatgagactgttcaacataccaggattgtttcaaagttcaggctggacagcacctgatcgatgatgactatccagactgtagccacagattattcttattttaaacgagcaccctaccagaaactggccgtttttaagaagtttataagatgtttccaaaaagcctacaaactttttagaaacaaaaatagcaagatggtgctaatcaggacaagtctccaccaaacccggcaaggaggtttatgcgagttgtgcttcctagttagaaaatactacctgaattgcttttggttaagccaacctaagccattgctgtggataatgactagaactccaaaagaggaaaggttaatagggacattatagaaaaataacaactatctcacaccaagccataacacgtgtgttttcaaatgtatcatctgataaatctacatagtcatcttatagttaaataagagtgactgatatctagaaccatagatagtgtcttcccactgctgttccatcaggacctggatttctatcactaagactgaggcagtaagatatagataatagcaatgtaatgagtgtgtgcatgcgtgtgtgtgtgtgtgtgtgtgtgtgtgtgtgtgtgtaattgagagacagaaaaataaagagagggtagaaaggcagatgtgggcagggggaaagagggaggaaaagtggatgaattctggtaaaatcatataggcaataattatttatgtctaaccaactaaaagtgctaaaactttttttttggtcttatttgccaaggtcaaagagaactatgtgtaaatagcaaaatagaaatgctcatcttaaactttccaaacacttaagtcttacgatgggaaatttattgacgaagaagctgtattgcttatggcacaataaaaacacatttaaaggttaggcacttctatccgagcgttataaggaaccttatcagcactctacaaatttgagctaaattatactcattcacaccaatggcttacagaagctcttttcttagcaaaatagaattttactttaacctagatattttctttattttgcatatttaaatatcacattgcagtacattgaaataactcctcttacataaaaatactattacctaaaggaatgctgttaacacgcctgtgttctgttacaagctctaatattaataaagcagagcatgtgaggatttccaggtaagatgacggtctcatccatgagtcaccatgccactctattacaaacgaggtcataccatgtttccctttgatgtctcagtcatatagtattaaattgtacaaagtctgagaaactttaaggacacgaaggaacaaaagtcaagctatgcaataagtagagccttcaaagccaaattactaagctactaactctgtgaccagagactccagaatagttgttcaaggttgttctatataccagatctttgggttaatgaacagtggatgctatactctcaagagtcttattcatcgagcaacaaagggtcaaatgaaatgaaataacttgtacagaatgtttgaatatcagttgtggttagctgtaaacaatacaacctaagtgtcgttcttccattaaggtgcttctataatgcacccgtatgtgaagaaataaaatatgtttaaatttacattttaagacccgtacccaaatattatatgatctgttaacctaattaaggaatattatgttcgtaaatgatagggaaagattctatgcttaaagggattttagaagaatcatgggaataatattcagttagaaaagcaatggagttaaatgctggaaagataacggaatatgtccttcagttgaaagtgttacaaatagaggtgtcctgttattttcagcattttgagagttgctatgattttttatgtacgttttaaagtgcttaaattgagttataaattaatacagaaaagtggacacatcttaagggtacagcttgatggatatttacaaaggaaacacatctatggaatctgtacccaaaacaagaaacagaacattgtcagcaccctgtaaagctcctcattttgtggcctcaaatcttgactcaggtgattgctttcctgagtgttgacaccataaactgattttgctaattttgtactcaatataaatagaataagaaagtggagggggggtcttcaaaaagcttatggaaaatgcatattatgaaaaatgtgaggatttcaattttttccaccaaaataaactcatactaacttgttataacattcctgaaccagatctagtttgaggtggtaagaaagttaagacatcagtctgaaacaagcccctaccagggcaacatgaattcagtaaaattgaagcaaggacaaatatcaaatttctggtgaagcttgcatagaagaatagtgaaatcattgatgttttacaaaaagtttttgaggacaatgccccaaagagatcggcagtttacaagtggataactcattttccttaaaggacaaggaacaagacagtattaaagatgaagcctgcagtggcagaccatccacatcaatttagaagggaaaatattcattttgtctgtttcctaattgaggaagacaaacaattaacaaccaacatcatacacatctcaattggttcactttgtacaattctgactgaaaaattaaagttgaggacattaaacttagcaagctaacataggaacggaaaaccaaataccacatgttctcacttataagtgagagctaaatgatgagactcatggacacatagaggggaactacacatactggggcttttcagaggtggagggtagcaggagggagaggattaggaaaaaaaaaaaactaatgggtactagacttaatacctgggtgatgaaataatctgtacaccaaacccccatgacacaaggttacctatgtaacaagcctgcccttgtacccctaaacttaaaataaaagttaaaaaaaagttgagtgaactttctacttagtgggtgccaaaactgttgcacccagatcagctacagacaagagcagagctttcaatggaaattttaaacaggtggaatcaatatcctgaaacattttatcaaataattgtaataggagttgaaatatggctttaccagtacaatcctgaaaacaaagaacaatcaaagcaatggctactaagaggtggaagtggttcactcaaagcaaaagtggaccagtcaagagcaaaggtcatggcaaaagttttttggggatgcttgaggcattttgcttgttggttttctggaggaccaaaaaacaataacatctgctaatgatgacagtgttttgagaatgttagccaaagctttagcattaaaatgcccaggacagcttcactagagtccttcttcaccatgatgatgcccctgctcattcctctcattgaacatgagaaattgtatgacagttttcacggaaaatcattaggatcttacagttctgatttggttccttctgacttcttttcgtttcctaatcttaaaaaaatctttaaggagcacccatttttcttcagttaataatgtaaaaaagactgcattgacatggttaaattcccagaacagtcagttattcagagatggactaagtggctggtatcatcacttacaaaaatgtcttgaccttgattgagcttatgttgagaaacaaaggttatatttttattttttaattccattttccatgaaatttttgtagttcccttatatgttctcttttgtcactgtctttttcttagagatataggagggagagtaaatcagtacaacaattttttgtgttcctgtacctacattcagaaccctctgatctacaggcaattgctaagatgttgttagttgttaaattcctgtcttccagaaagccattggaaaatttgcaaactgaaacatctacctctttctccaagttcagatctagaaaataattatagaaatgcttcatctgtgcaattagaatttagcacatgaagtcactgacccgtgtacactagcaacaaacaaaccatataaaccattctgagtttccaacaatgtaatgttgtgtgaccataaagtttatgatgctgtagaaaaatatttaatttggaaagataataacaacaaatattttacacatatttgagtctaattcgttaaaatatatgtgtatatacatagatacatatacatggatgtgtacatatacatatataggtatgtccccatatggacatataccaaaatactaatagtgattatctcttaataatgggagtctggtattgcttttttttcttttccttgagagtcgttcaatcttttaaattctctacagtttggatattagaagtcagattctttttgtaatgttattcccaattttaatatatgtgataaaattgatagaaaggaaagaaatttcgggaacctgactacacttaaccattaatacttatctctagttttccctagtcttcaccttatatttaatcaggttgatcgtcttactaatttccttctagccaataccatagatgacctctagcactatctaccaccatcaaaacgttatgtatatttgatgatctacctcaattcccacatcttcatttgactcatagactcttccatatcaaattcctacacatttgtcatttggacacattctatcttgcaatattgacttattttcaaaggagtaaatcttgattaaaaataagaatgtaagtgcattggttacagttattatgccattatttattttcaaaatttctgtaatatctcacataggaataaggacccaactggcatccaacaaactcactgaattgagtttaaatgaattaagttgaaaaaacactgagactcagtaaattaatattttagagaaaataacaataaataccaatgcataatttggatataattaacatgctaaacttggtaaacaattttattgaggtaggctttcctgtagcttaggatttttcatttaatcatccaatatatagcaaatatatacaaatatttgttgctcaattatgtgttttagcttgctaagactattgtaacaaagtaacacaaactagatggcttaaacaacagaaattgactgtctcacacttctagagacagggagtcccagatcaagatattggcaagactggtttcttctgaaggctatgaggaggaatctgtttcatccctctctccttgttttggttgtttgctggcgatatttggcatttcttgattgtatatgaatcatcccaatctctgccatcatcttcacataatgttttccctgtgtgcttatctgtgtacaaatttctcctttttataaggacactagtcatattggatttgggcccaccttgttgagctcatctgagctaattacaactgcagttctagaggctaggacttcaacatatgaattttggggagaacacaattcaacgtgtaactctagtgctgtgcatttgatgctgtgattaataacattctaaaactttcctgaaatacctaaaacatattagagaatttaaggtgtgtgttcacaatcagttttaagatggatatggcccatgacagtaatgaaaatatttagaaaaggtgataatcaattccatctggaatgctcccagccttactttttgcatcttcacaatcacatctcttacttccctggcttgctttctttgattctttataggagtgattagtttcctagtgctgcttaatacaatacccaaaatgggatgccttaacacaatagaaatgtattctcttgaagtttgagaggctagaagtttgaaatgaaggtatcagtaggcccattgtctctctgaaaactgtaggggagaatccttccttgcctatcccgccctccagtggtttctggcagtcagtggtattctgacagtcagtggtttctggcaggtgtctgtcagtcagtggtatcctggcagtcagtggcttgcagttgcgtcaccccaatctctgcttgtatcattacatagtgttttcccttcttctaaagttctctcctcctctaaggataacagtcatattcaatttagggctccccgtctttcagtatgacctcaacttaacttcatgacatctgcaaataccttattttcaaatgaggtgacattcacatgtacagggagttaaaacatggagataccttttgggaggacaaaattcaatccactacacctccattgactccacaactactttgccactcagttgaaactgttctcacctagattgtcaatgttctggtagtctccaattcagggacagagtggaggttgtataattcatgatgttttattgatgattcctccatctcagaacattcttctcttggtgtctgtgatacctcaccttctcaattttccctattactgttcaagctctggtgtgatctcttcctcattttcttccacgcacaaatgttggtttcccccaggattcctcttgaaacattccacacaatctccctttgaaaactcagtagtccttgtcttcagatatttttcctaagccatgaacatttttctcactgcatattgggcactcctgctacaagtgtttttactccaactccttaaaactgaatttattttatctgccacatcctaccaatgtgctcttttttctgagttttttatctttgggaaaagtaacactattcattctttttcccaaacaaaaacccagcattaatctttgattactcctccttcatccttcacatccaaacttttttgctgttcttgttttaagacagggtcttcctgtgtcacccaggctggatggagtgcagtggcgcattcacagctcactgcagcctcgacctcttgggctcaaatgatcctcttgcctcccgagtagctggggccacaggtgcatgccactacacctggctaatttttgtagagatgaggtttcaccatgttgcccaggctggtcttgaactcctgagctcaagagatctgcacatccagtcttaaaatccaaactgctgttgccctattacacttatcacctggctcctatctactttcttagccttatatcattcttttattctcatttatttctacaacactacattggttttctatttctgttggtttgttttgtgaaataccacatgccttttcctacatgcagacttttgaactttctgttcactctgactggaatttactttccccagttctttacatggctgaatcattgtcttccttgagttctcagatcttataaaaccttctctatatttgttagaataacctagatgttataagcatacacacatatacatacagagagatgatagtttttaatagtgaaaacacaataaaagtttatttcttgttcacttagcattgagtgcatacaaagtttggtccacagagtttcctttttctgcacagtcattcaggaatgcaggcagatgcagattcagattctgtcttatttaacacatgacttccaagggagctctggagttatttccattgctacagcagatgaggaagaagattgagagatcatcatggcagattgttatgggccaggcctgggagtgaaggtattaaagcaataccttgtactaactcaaagttctgtaaatcagaaatttgggtggatttaattgggttcgtaattagggctttacaaggccaaaatcaagagttggggcagtttgggctctcatctgaaggctctgggaaataattcacttctagactcattcaggttgctggctgaattcagtttcttgcagtggtaaggccaaggtccctgtttccatgttgcctgtcagtcatgagctgctatcagcttctaggggccacctcaggtcctttcacatggctccctccatctcaatgatggaggatatccagtccccctcatgcttcaaatctctctgacttttgcctccagctggagaaaacactctgctttaaattgctcgtagttagtttgcacccaccaggattcatttccttttctccatataaggtaagataatcataagtgtgatatctcatgaaattcacagattccacccacactcaaagggggaaaattgtatataggtgtgtgtcactgggagtcattcttagaattcttcctaccacaggttcagaagcagaatcactcaagcatggttcttaccctgtgaccttactaagccttggtttcctggtagaatggtaacaacagtacctactttagggatttagtataaaaattaaatgtgatagtgcatataaaaagattagcataggtcccataactcttctaaaaatggtaaataatcaacaacccatgctattagtcgcagaaataaggaaattattgttatatcatcataaatattcttaatgcaaaacatcctctgcatgcaaaaaaaaagcatgtctctaaacttcatgttcaatttaactcagaaaatatttgttgagcaggtactatgtacctcagaggttagaagttatttataaaactaagatactgtcattcttcctcaaatcattcccagttcaattgcttagacagaaatacataaaactaaatagaatgctgtccaacctgtggtaaattctgtaacatgtgtgacaacaaaagagaagggttcaacccagtgtggaagataaagtgtcacagaagaatgttcacaggctttagagtcgagtttaagaactgaggaacaggcaaacataaggaccatggttgcgtagtcactagacacagaactattaatgcgcatttcacaaaaattaaagagggaagagtttaatatgagtgtgcaccctgggtaagtaatcaatagtgagaagcaaggtgggattgagattatcaaaggtgctaagttatgttgagatatttgaactttgttctgaagcaagagagaaccattgaaggattttcagaaataccacaagacaatcagtgctttagaaaacacatagttggaacatatcattgcttcaacatagcgaagactgagtctgtgtagctgttttctccatttagcaggcataaggacaagtgggttagaacactaaatgcaagaagctaattggacttaacaatacagatggcaaaaggatgaggagaggagagaaacgcattatgtttatttgttaacagctctattgtattgtatttatatgcattagtcagtgtaaaataaaatctgcttattttaaatccttttaaatagtgtttaaatatttcctgatgacacaatctgctaaagtatttacccttggtgcagatttccattaaccttgctgtagatactaagcctacaaccatatatttatagggggctcaattatggggtaaagcctagtgacatcattataaaagcacatctggataagctttagggtctttgtctttctatctgatttaggaaatttagtaaactgtaggagaataccattattaacagcccctgaattctcagattatgaggatgtcctttctctcaaaataaaggaagagagggattaaaatctctaaagctgtaaatgatatagagaaatgcccagtacacagatatcagggatattaggggaatccagttgtgttggatatacaagaagaaaaaaaaggcagaaattaaattcaaagtattctttcctcatgtcttttgtcagtttttttttattgttttttagagagtctatataaatcctttggttccctaaaggacaaaattcctttgataattttacaaattcttttctaaatagtatctctgtattgtagattaaaaaaattaatacctaggaaaggtcaggtcacttctttcagtcaaggaatgactcattcatgaaactggaaagaaaacttctttttcactcaccccaatacttgatagctatcttaaattgaatatgtctttaacagtatatttgatattatcagtgtattttgatttatatatatatatcgtatatattatatatctgtgatatatatctatatatcatttatatatctgtgatatatatctatatatcatttatatatctgtgatatatatctatatatcatttatatatctgtgatatatatctatatatcatttatatatctgtgatatatatctatatatcatatatattatatgtctgtgatatatatctatatatcatatatattatatgtctgtgatatatatctatatatcatatatatatctgtgatgtatatctatatatcatatatattatatatctgtgatgtatatctatatatcatatatattatatatctgtgatatatatctatatatcttatatattatatatctgtgatacatatctatatatcatatatattatatatctgtgatgtatatctatatatcatatataatatatgtgtgatgtagatctatatatcatatatattatatatctgttatgtatatctatatatcatatatattatatatctgttatgtatatcatatataccatatattatatatctgtgatgtatatcatatatatcatatattatatatctgtgatatatcatatataccatatattatatatctgtgatatatatcatatatatcatatattatatatctatgatatatctatatctctctctatctatctatcacattttctttaaccattctatcagtgatgggcatttaggttgattccatgtctttgctatcatgaatagtgctgtgatgaacatttcttttgatttttattgtctgtgttaggacatcataacagggccctcctaataccattaacaacgcatcatgaccctggtaatggttttgtagctgaagtctagatagtttaagtgccctatcttattcatttgtacatattcaatatatataataactactattttctggacgttaagagaattgctgaaaatacagtggtaaactgcaatgaccctatatatcctggtttgtacactgttttatcttctgtttcagttaccttgcttaaatcttgtggctatatgacactaataaaagttaccaaatttgtaataaatagcatcacaaatatttcattgtgcttgagattgtttcaaaggttttgatttttctggctatacacacacatatgtaacataacataattaaaaatgtaatgaacatcactagactactagttaaacaagttatggctaataactaatatgtacacaaaatatgtggacacaatagaacaagcaaatctttatcaataggagaatatcttcaaagtgtatattgtaaagcacttgtgcagaaaagtatattctatattctgctaatgtttatttgtttggttatatgtatgtagactacatctggaggcatacatataaattcaataattgctaaattcctaggagaaaactgggtaatagtgacacaaaggtggagagagtcttaatttttatgtaaggtcttctgtacattttggctatcgtaccatgaatatatattaatgcattattcattcaaaattaagtacaatttaaaaataaaattactacaaaatggtaaattttaaatgttaaagaaaacttggaaaaatataaagaaaaattcaaattgtccacaattttatctaccagacacaatcactaattatattttggcttatgcatttaaagtctgtttttttattattaaagcacagatacaaacatataattgggaccagactgttttacaactttttaccactttataatatactaagcttattaccaaattgcttgctcagcattcttttatgtaacattttgtgtatgtgcattttaagttttttaaaattaataccacaaatgtgtttatgcattatttaaaatgatatattcttcttcctattttgtaaatgttttaatatatatgaaggatgctaaccatttgcatgcactctatatgacagttatttttttccgctttgtcttttgtatttttttactttgtttatggtggtttttaaattaagacatttttaaaacttgtagtcaattcaaatttagatatattttccagcatagtgtcttccttaaatagaaacacttagattttcttcacttcaagaatagataaatatttcctgagattttctttgataatttatactttcaaaaatattttcacatattccagcttctgtgaatatttttatttatttatttatttatttattcatttatttattgagacagggtctcactctgtcgcccaggctggtgtgtagtagaatgattttggctcactgcaaccccgcctcctgggttcaagccattctcctgccttagtctcctgagtagctgcgattacaggcatgcaccaccacacccagctaatttttgtacttttagtagagacagggtttcaccgtgttagcccggctggtctcgaactcctgacctcaagtattccgcccaccttggcttcccaaagtgctgagattacaggcatgagccactgcacccggccacttctgtgaatctttaaattacccaatgatgtgtataagggttcaaattttattcccattttctcagtgaagaaatagagattctgaaaactgatttgatatgcctgaaatcataaagttagttaatgtcatcgctaggactagaattttggtgcttacacaatgtgctgactcccaaatcgtaaatttctaccagatgtttaaagtaaaagaatgatgggaaatttcattaaactattaactatattcagtggtttcaaaatattaatacaacattgatatctttagtgcattatcaatgtattcttggagacaacatgtcaattaaattgtctcttattcaaatgttaacttcagtttttaaaatttaaagctagtctgctgattttcaataagagctgtctaatattgtgaactagtgaatttgaggagataaaagtggaaattataggtctgcagagtgtagcattgataaagagggggccatttcttccaagtcagtaaagaaaagtgatgaaacataaactggaatttttgtgattctactgttgcatgaccttataacacccctgttttaattaactacggacctgaaataataacgtatatttctaatccactcacaggaatggtaggtatattagttagctagggctgccatgacaaaatacaggctgagtggcttaaacaacaggaatgtattgtcttacagttctgggtgctagaagtccaaggcaaaggtttccataggttaggtttcctctgaggcctctctccttggcttacaaattgccgccttcttgcaatgttcttacgtggtcttttctttgtacacgcacaccctggtgtctttattcccatccaaattttctcttcttataagggcatctgtccgattgaattaaggctcatcataatggccttattttgacttaattacctctttaaagaccacatccccaaatatggttacattctgaagattagaatgtcaatttatgaattttggacggacaaaattcagcctatagcagagggtctgctttgcaatgattatgcactattactcaccaaggtagtaaaaattaagcaaacatttatatacacaagtttttgaggggataaagcctacagaatataagaacaaaatattttcaagaatgcctgtctgtggttctttcattaattcacttcttcattcatctttattgagtacgataatgaggcagggaaaatataaccatctgactatgaattgacctggtgcttgtagacatatgtggtttaacagttttccactttgtgtacccctctctcataacatgtagcatactctgctagaattattgattgattaacctcattgtctttctcactagatcatgagtactttgagggcaggaactttatctttcatctttcatcctgaagacatggatcagcatatgtgtatagtaggagaacaataaatagttttcagaatgaaggggagaattaattttttcatgaaaactagatgtcattatgtggagaatttatcagaatgccagactggtaaggatgttcagagacacagtagttgacctaagactaacctaaatctgtttgtatcacagaagtgtaccaatgcttgacatacattggataaaatgtttatttcctatttctctgtattgtttggccacatgactattgcaaagctcataagcacaaaatttgcacaaaacccctgagagatgccatccatggctacaaatacatgttttgattatattaaagtaaaaaaattgatcaattattttaaatattcaaggtagttaagtgaataaattctatgtaattacaaccacaaggttggtgcatattttagaaataaatgcttgttttactatgagaggaaaactgcgaatggcacacgacctaaacaagggcatcctgtttgcttggatgaaaattccatccccatgtttactataccttccactctcattcaaacctagaacaggagaaaaatagttcgagtttaaaaacaaatccagtagagtttaggaaagtttgtctcgtataccacacctttaaaaggctattttgcaatgacaatattcttgtattgccctctctatttttccctccctattgtatacatgagcccagcaacttctagaatatactagcacatatgaaatttttgaatatctatttcatgtagggagattagaaagtcactttctgccacttgtgtagctctattatgcaaaaatcaagaggatgcagatcataaatcccattagggtggaactctggatgtggaaaagactatatagataattttaagagatttcccctcagctgaatcattgctataaagttaagcatggtttttaaaatataaatcaaataaatggtttctataaaggcacatacctttactgtaaactgaactccaacaaacttttgagtggacatttctcaaatacagcatctattgaaaacttcctctgaaaaaacatttcataaaaattgaagcttgccttacatattttcatactatgtggttttaatgaccgttgtattccactctatcaccataaataaatatgtgactttaaaagatatgttgtaaataaaattagctcgaaaatactaacactaaccaaacattaatcacagaatttaaggagactatcagagactaattcagaaaataaaaatattgtaaaattactaccatgaaagctctaagaaaagttcatgataatttcagtgatgctaaggctacagaccaaatataaacttagaaacaaaagtatttagtctaagacaaattaaatgtgtatatattaatttattttctctgtttgatgggcatagaagcccatcaatactctgaatttatattttattaatactctcacaatttactttcatatgtgacttactatgtaatataaaaaacaaaagagcttgaaaaactgagatcagagggcaacaataaaatattaatgctaatattatcttgaatttttatctatacatatttaaatgttgttatcctcactgaaatttgttactaatcagtgaaactttagtatttacctaaattagttcttcttataagtagctcaatctccataataggagatagactataatttgtactttagcataaatattcttctaaaatcattcaccgttttatattgtaattgactgaaacaatataaagtggcttaaaatcattggtatattataaaacctatgtcagataaaacatggcatctgtgaagtttgggaattataacccagaacagtgtataattcaaaacagatacctgaaattatcttgtacacatctcgctatctgctatatctcatcacataaaatgcatagtagatgcacaaagtagctgtccaacaaatacttatggaattaataaatgaaggaatgacaaaaatgcttttcctcaatgtgctaagtcaaatacatgtttccttttataaaaatttaactatatgttttagatttagttgaaaaaatctatactggaatttacataattacataatacatattttaaagtattattcccagtatttatgaacattcattaatgagaatggcttctacattaaaagatcagttagcctctgctatttttgataatgatttaaacttgttaattcttacctgtataatgcattctcctttacaaaatgctggtatggccacttgttttatgttatcctcacaacaattgtaggtatagatgtgataaataatatactcttcctattctgtttttctttttaacaaatgagaaaactgaggcctaaagctccagtgattcactcatgtttacacaaataactctaaactggcgctcagctcttgctaattctttgtctcctcttttgttttgtttttgtttcattttgtttccctaaaccataatgccatccaatattatttaaagtttgcctgcctgcttttgcaatggttcttagctttccacaatagcaagtgcatcaaagaagaaaaaggaaatgattatatggttattaatcaaactcagatatggctagtaccacctttataagtgaaacttatataacaatctcagtttatgtcagtctcttatcccagtgtttaaagttttaaggactgagctgggaatgtgaggaggcttttgcttttcattttgtactctactagttttaatttttcactatgtgcatacatctgcaccccaacctttaaagaattagtttcctgaaaaaaaaggaaaatgcaattcatcgtacaaataaaagcataatcccttttattaatttttagctaacaaacacataataccatcctattccaggtactgtttttaaatgacttgtatctaaatgtaatgttaacgcatactttcgatgtgcataaatatagccaagcagtcctaaattcagataaattatcttccatctactgtatataattatatagtatttcctaatttttataaaatatggtttgtgtgtatgtatactgttactcaaatgaggttttgttgtttttctctcctcaaggtcaaaaacaatatctcactctatcttttgtgtcttttgttttttgatttttttttttttttttttttttgtctgctttgaacagtttttaagaggaaaagaagaaaaggtgtttgggggttacataaaaaaagggagaaagagacccaaatctcctgtctcttttatcacctacaaactgtattgattttcactttcctttcctaaatccatgctttaaagacattgtccatctaagaaacatagagtcccaaagcacaagttttgatgtagtgagcacccattgattgtaccttgaagtggatgtaggtaaacagatgacagatagatcaggtagatatatagatatagatatagatagatttatcttgaattttcctagatcccattaatctgaatgtacaaataagtctcattagttctaatatttgtatttcactgcctcattgccctcacctgctgtagatgatctctgcctccagcaaactaatcctcatgcatttctggggagtccatatgggttttctcacttgcacttaggatcaagctggacaccaattggctaagtgccacggttactccactgggcatctccatgtcccttctctggataaacaccatcatctatgggcataaggagcactgctattcttccattgctgctccaccaggtacctgagctctcccactgctgtgccaggtggaatagttttccaccaggggccaccttagatattcctcgtcaggtgagtaccaggactgctttgctaggtagagctgtcccagtcgattctaatatgcccctctgctgttatatctgtatcactgttctgtattctgctagtaccaaagctgaatgagactatgttaaaagtagtggtggaaaaatgtctttcttccttgcctccctctttcttaagtgagtcctaaaagaatactgagtagattttggtatcttaaaggtttaacaaaacagatcttctttgttttactctaaatacaaatctgagtaaactagccaaggctctcagaatgatctctctcttctgagaaccagggcaccatacctggctccgatttctctcatggtgaattcttcaaaatgttttccagtgcatgggctttcgctgggttatctcccacgttgttcacaatgttcagagatatctgagttaacagcacacccagaggtgttccctctttccatgactgtcccccacaaccccacgccaagaatgccactccccagttctaatggcagtatgctgctggtagcctggccacctgtctcagtccatttagtgttcctataaaggaatcacccaagactgggtaatttataaagaaaagaggtttaattggctcacggttctggaggctgtacaggaagcatggcagcatctgattctgaggaggcctcagggagcttttactcatggtggaaggtgaaggggagcagatatatcatgatgagagaagaagcaagagagagagagagaggaggaagtgtcaggctctttttcaacagccagttcttgtgggagctaagagtgagaactcattcactcccatgagaatgatgccaagccactcatgagggatctgaccccaagatccaaacacctcctaaaaggctcagcctcaatgttggggatcaaattgcaacatgagatttggcagggccaaacaaaccctatccaaaccatagcaccacccaatttgccagatatacccaggcagatctaaatatatcttacactcacaatcaggtcctccttttatgagataccaaagatgttccattagggttctcagacaaacagaatggagaaagagagatttattgtaaggaattggctcacatgactgtgggagctgacaaatctaaaatctgaagtctgcagggcatgttagcaggctagatatccagggaagagttagtgttgtagtcttgggaccaaaatcttcagggcacgtattagtctgttctcacgctgctaatagagacatactcaagactgggtaatttataaaaaaggaggtttaattgactcactgttccacatggctgtggaggcctcataatcatggcagaagagcaagagatgtcttacatggcagcagacaatagagaatgagaaccaagcgaaaggggaaacctcttataaaatggtcagatcttatgagacttattcactaccacgagaacagtatgggggaaactgcctccatgattcaatcatctcccaccgggtccctcccacaacacgtgggaattatgggagctacaattcaagatgagatctgggcagggacacagccaaaccacatcagggcagatgagaggtttttgttcctcatgacacaaaatgtggtgtcttttccaacaccacttcttcaattctctgacactcactaggcatgctatagttcagctcagttctgacagtaactacctggagttagagtaagactccatagatttaagagcccagtcccacaagactaccttcccttcagaggccaggcacaagtattgagtccccactttagccacaattctctccagctgagctacacagtcttgggttcccacaaccccctcttcagggttgataatttgctagaatgactcacagaactcaagaaaatgctctacttactattgcagtttattttaaaggatgcatataaacagccagatgacaaacctcctcaaattctgtttaggggcttttaggaggtttcatgacataggcatgattgatcaaatcattagccattgatgattgactcaatttccagccactccccttctcccaagcggttgctgattgagtagtgaagctgaaagttccaagcttctaatcaaggtttggtctttctggggaacagcccttattttgaagtagtctaggggccgtctgacagtcacttaattagaacaaaagatgctactatcatctttatcactcagaaaattccaaggattttaagagttctgtgccagaaacctggtacaaagaccaaatatcttcttatatcactgcaggccagcagactggaaactcccatagaatttttatcatgcagtcttgaggcagaattctttcatctttgggaaatttcaatctttgctctaaaggctttcaactgatcggatgtggccaacccatactatgtagggtaatttacttaaagtcaactatctataaataaatgttaatcacatctaaataataactttatagcaacatttagattggtgtttgatcaaacaagtggataccatagcctggccaagttgtcacacaaaagtaaccatcacagatgtattattttatttaaaatcatcagtattatatgaattaattcagaaataaaaaaggtgttgtcatagtgtgaacacttataagtgtctttcccacagaaatgtcaacagactgtgatttgaaaattgctgttttaaaagagaaaagctcatcattctacagaaatgattcaaagatagacaatccattaaatatcttataatgggccaaatactactagttgttaatttacacttgcaacatcaaacactttaccagctttttaacatgcaactgttgcatatgatgcattgtgttttttgcaagtaggtatacagcataattctaataggatatttatttacaacctaaccttacaatttaaagtctgctactccattgtgctcatcctacccgctgtcttcttatattcaaagctattaaggagtacttgctcagcatatcactccaaattaaactgcaagacattttatgatgaattaaatgggtgacgctctcccagcctttgtaactactagagcaagtatccaagaagcagacaattttatcacaaaattctgattgccaagttgtttttattaaatagacatacagtagagaatttaatcttagaaagcatctaacataaacacagatttctcgttttatagatgaataaactaagatccaatgagggcaactatttttttccaagttcatgcaggcagctaacaccagaacaaagactaaacaaagctcttctaacttctccccccatttttatcatccattgcattcattactacaaaattactacaaaattattagcctggtctttaatggtggccccaaagaatggtttttagtattacttccttcacttctttcgtatgtcctgtgctccagctaaactgaactatgttgaactaagctaaacatttctccttaagcttgtactgcattttgctacagtctttttgccaactcttcccatccagaatgtcttcactctctatctccactgctttaaaacctaagcaattttcaatttaagttctatctcctttttgaagtattgtatattcttctagccagataaaattctaggaaaatattgtcatacttgactgcataaagatttaaattgtctatatagcaaaataaaaccattattgaaatgataaaacaagtgacaaactagaacaaaatactttatagcatacttatttaataaatatctattgatagcttgctaagtaataggcactatactaggtgctatatccaagtaatgttgacttattagctttcaattagaaaaagagaaacactattagatatgggtcaattagataaacaggcacatccaaaaagaaaaaaatatgtaaatatagtcacagagataataataataataataaatgagatgctacttaacatttttcaaatgtgtaaatattttttaaaattagatttttccatattgattagaagatggagaaaagagctctttcacataatgctgctgtgaatgaaaattggcaatttatatcataatgtgccacagttttgttctgtatggtctcaatcccccctgtaaatgtgtgctctacttttctctaccttgtcctgagctttagcctctggattctctttgggttctgccaacgtaagacacaataaagagaacaacagacaggagggaatgaggccgaagtgtttattcctcaggctctgtgcttgcaagggtccccaggctctgtgcttgcaagggttcagatgggcagtagctgttcctccattgaggggaggcccttcctacagtacagctgtctttccagctggatgtggtcctcagcctaaggcagcaatggcttggtctgtgtttagccactagctgcgttcttattcttgaatgtgccccttaagcctggcccaaatcctgtaaatagtccctgacatatttctcttcaataattccatttcagtgtgccatcttctcccttgtcaggaggaccccaaatgatccctctttgactgggaaattctacttctaagagtttatgcttaaggtgtaattaagaatgtacccaataatacagtaatccatattaaatgttataatagtagtaaaaatgacactagtgaagcacaaaagagaaattaatccaaactgaaagagtttgagaaggtttcttatagggtgtggcatttgatttgtgtcttaagggtagcatgagactatgccaaaaaagaaatgtgtatgtcttgccacccaaaagagatatcttggccattgaggatagagattcattactttcttatgctatataaggcgtagtatagggctaggttgaaatagtattaaaataatatttaaggattgattataggttttcattgagaaccattctcaggtgatactttactaagctgacaatagacttagcactgcctggcaaacagcaagtagcagtcagtgatatagccatgattattactgaattaacagcatcttaatcttcactacgatatttgaaagggaacactgattcataaacctactcttttcctgccacaggtagtcaggaacttattattcttattatgtctcattattaacttctgttgcctaacaagatattatatattgtatgtcacatgaatattttcttacaaagtattaattgattcctaatcttgttaaagaatatgatagtagcaaatatccaactaattctgagagaaaaacctccagttttgcaagaaagatttagccaagttatgcaactaagtttgttcaaataataactctataaagttatctcgattatctcctctttagtttatgaatcgaaagcattgatgaagatcaaaagctaactgatgcctccctaattctatatctatccttgtgcagaggcaaagtaggggagtcagtaggatgtttgtgtgtgtgcgtgtgtgtttttgtatgtgtgtgtagatggagacagagaaccatagcaagatagagagagaacacgagaggagactgagagagaaggaaagagggaggaagggatggatggatgaaacgaggggctttctctcattttatatcataaaagtaaccaagaaaaaaatcctgggttcaatattttataattattacaaatggggtattagagatgttcaggaagccagagtagaaggcagctagctaagaatgctgtcagcctaaggagtttttcatggacgcctttttattctaaccagccacagaagaaaagagggaaatgaagaagcatcatccttcactatcacaactgacaataagggttctcccttacctcccacccccgcccccactacacacacacacacacacaaagtagtgactgaaaaccctcagcaggctgggctcccctaccacatgccacctgctgcaaatgtgttggaggcaccaggtcctcctttcttttttgccagttttcttattgcagaaaggttttactattcaacaattaggagtgtccaaggtgttaggggtcataagatacatccttgttctcaaagcgcttataacactgtaactactgatgactggtataaggatgcttacaagagaaatttattaaaagggcaactcagtagagtacaaactacgcatatgttgaagagagtcaggagatgtttcatggataatgcaaacattgaacagggttttcatgaaagggagggatgtggatttctctgataaggtggaaaacataagcacaaatggaagaatttgttgagtttagtatgtggtttgtgttcagttttaaatataagtccttatcatagcaaagcgatttcttttctttttgtttttgttttttccttttttaaattattttactttaagttctagggtacatgtgcaaaacgtgcaggtttgttacatatgtatacatgtgccatgttggtgtgatgcacttgttaactcgtcatttacattaggtatatctcctaatgctatccctcccctccccgcccaccccccagcaggccctggtgtgtgatgttccccaccctgtgtccatgtgctctcattgttcagttcccacctatgagtgagaacatgcggtgtttggttttctgtccttgcaatagtttgcccagaatgatggtttccagcttcatccatgtccctgcaaaggacatgaactcatccttttttatggctacatagtattccatggtgtatatgtaccaaattttcttaatccagtctttcattgatggacgtttgggttggttccaagtctttgctattgtgaatagtgcggcaataaacatacgtatgcatgtgtctttatagcagcatgatttataatcctttgggtatatgcccagtaatgggatagctaggtcaagtggtatttctagttctagatccagacacatgaaaaaatgctcatcatcactggccatcagagaaatgcaaatcaaaaccacaatgagataccatctcacaccagttagcatggcgatcattaaaaagtcagaaaacagaaggtgctggagaggatgtggagaaataggaatgcttttacactgttggtgggactgtaaactagttcaaccattgtggaagacagtgtggcgattcctcaaagtgatttcaactctacagatcagtttgaaagcacaggactggatctcagtgatggttaattgctcatctggccaaagaaaagcatgttgcaaggttaaggctcctatgaggaaaaggagagcaaggatgttcaggctgaataaagcccctgtttttattaattataaggtcagaatctggttctcctggaatcaaaatgctgagcaagcaattgtggagcaagggctacacaatggcagagatgaatgcaacctgatattccacatgcattctggcgcagctcattgcttttcaggcatctacgagaaacatatcaccccttaggtttgctgccgaagatgtgttctcactgaaccataacctagcagaggttctcaggttggaataccaaatagcaagatgatgtggtcagtgctacctatattgctctaaaatttttaaacatctaattgatgatttgtgggaaggttgcacagagagaagaaaggaaaaccaggaaaaagctgtgtttttaatttatgaaatattaagaagttttcggaagaagacccagacaatatgtattagatcataaagaagcaaaaaagtgctatgtaattttctgatggtagaaacaaataagaagatataaattcctcagtttacaccatgagtttaaagaaaatcatcacctacttactggttcattttgtaaattgagatcaatgaaattctctgaacaacagcatgaaatcaatcgtaaaatagcacataattcatggccagtattgtaaattatagtttgcttgacagtaatcggtaaggtttccatgcactgggatgcatttccttgtaacacgtctaaggataatgcctgtggatccatttctaatgcatattagagtgatctgtttttccctgtccacaactccctgtgtttgatcttatgcaaatgatgcaatcaagcaaatggaaaacaagatgttgttgctcaggggctcttacaaacagtggccttatgttttcagggtttccccaccctccatttacccaactcagatttgtgtacatacctgcaattgtttgaatccgttgatccatttgtgttgcccttgaagtgcctaatcacatctatagagacatattaccaaatcagttgcagttaagctaggaggagagttgtcattactttcctctttgctttaaatttcaaattggtggctttgtttatggcttcactctcaaagaatttatcagcctcacttccctgtaaccaatctttttttcatttctttttgttaactgtttttaaaaactctctcattccattcatacattttacacatgactactccttccccccacgcccaacctgatgcctcctcctcttctccatttttttccctttccctcatcatttcctcctgttttaccaagaatttcccaatcagatcaccgtgcaactttctctgccacatgtcaaattaggttctcttctctctctctctctcttttttcatgctttattattcaaagaacactagtaacatttcatcttcttatggaaatacattgagaataatccactttgggatggacagtacaggcataaaaacaacttggaactcaaaaaagctatttaatcacaatggttttctttgtattatgtttacagttttcagatttttaaaaccaaaagaaaatacccaatttctattgtagtgactttcatgtgagtccgtgtgaagagaccaccaaacaggctttgtgtgagcaataaagctatttatttcacctgggtgcaggtgggctgagtccgaaaagagagtcagcgaagggagataggggtggggctgttttataggatttgggtaggtaaaggaaaattacagtcaaaggggggttgttctctggaggccagagtgggggtcacaaggtactcagtgggggagcttttgagccaggatgagccaggagaaggaatttcacaagacaatgtcatcagttaaggcaggaacaggccattttcacttctttcgtggtggaatgtcagcagttaaggcaggaaccggccatctggatgtgtacgtgcaggtcacaggggatatgatggcttagcttgggctcagaggcctgacattcctgtcttcttatattaataagaaaaataaaatgaaatagtggtaaagtgttgggacagcgaaaattttgggggatggtatggagagataatgggcgatgtttctcagggctgcttcgagcgggattaggggcggcgtgggaacctagagtgggagagattaagctgaagggaggtcttgtggtaaggggtgatattgtggggttgttagaagaaacatttgtcatttagaattattggtgatggcctggatacagttttgtatgaattaaaaactaaatggaataagagaaggagaaaaacaggtataaaaggtctaagtattgggacgactcaggacatctgattagagagtgcctaaggagattcagcatagtcctgccagcaaagattatttatttacttcaagagttaagagtggcagtttggggatagcatgaggagatgtcagctgtgatggcttggagaaacagtgtaaactggcagtgtaaacaagagcaggacatgtatgagtagttgagaacggtgaataggagtatgactagacagaagatagtagggatgacaagtttttttggggcacagtctaagttggtctggtgtctggaatgagactggggcctaataaaaaggagcgtctatacaggagctcaaatgggctgtactttgtagcattccgaggacaggcctgacttctgagaagggaaagtggtaaaagtattgtccagtcctttttaagttggcggctgagcttggtgaggtgtgtttttaaaagacctttagtccgttctacttttcctgaagacggaggaccgtaagggatataaaggtttcactgaatactaagagcctgaaaaactgcttggctgatttggctaataaaggctggtctgttatcagactgtatagaggtgagaaggctaaactgaggaattatgtctgacagaagggaagaaatgactgcggtggccttctcagaccctgtaggaaaggcctgtacttatccagtgaaagtgtctacctagactaagaggtattttagttatctgactaggggcatgttgagtaaagctaatttgccagtcctgggtgggggcaaatccttgagcttgatgtgtagggaagggcctgaataatccctgaggagtagtagaatagcagatggaacactgagaagttatttccttgaggatagatttccatgatgtaaagaaaatgagaggttctaagaggtgggctagtggcttgtactgtagcatagcctgcctttgctggtgtgtgatgattaggcctggtggaactgccatcaataaatcaagcgtgggcgcctgtagtcccagctactggggaggctgaggcaggagaatggcgtgaacccgggaagcggagcttgcagtgagccgagattgcgccactgcagtccgcagtccggcctgggcgacagagcgagactccgtctcaaaaaaaaaaaaaaaaaaaaaaaaaatcaagcgtgatcaggctgaggaacaggaaagaaggaaatatggggaaatggggtgaatgtcaggtggatcagagagatacagtcttgggtgtcaggtgtggtatcaggaataatgtgggaggctggattgaagtccgggccaggaacaatggtaattgtgggacttaacaaagagtgagtacagctgaaggagccgtggagcagaaagtatatgcgtcaggtatgaggaagaaaatagattttggaaattatgagaaatgtagagagtaagttgagcatagtttgtgattttgagggcctctaaagtattagggctgcagcagccgctgcacggagacatgatggctaggctaaaacagtaaggtcaagttgtttggacagaaaggctacagggtgtggtcctggctcttgtgtaagaattctgaccgcactaaccatgcctatgaaggaaaggaattgttgttttgtaagggattgaggtttgggagattaatcagacacgatcagcagggagagcacatgtgtttttatgagaattatgctgagataggtaacagatgaggatgaaatttgggcttgattgaagtaatgggggctatctgtgaagctttgaagtacagcccaggtaatttgctgagcctaatgggtgtcagggtcagtccaagtgaaagcaaagagaggctgggatgacgggtgcaaaggaatagtaaagaaagcatatttgagatccagaacagaataatggattgtggagggaggtattgaggataggagagtatacgggtttggcaccatggggtggataggcaaaacaatttggttgataaggcatagatcctgaactaacttgtaaggcttgtctggttttaggacaggtaaaatgggggaattgtaaggagagtttataggctttaaaaggccatgctgtagcaggcgggtgataacaggctttaatcctttcaaagcatgctgtgaggtgggatattggcattgagaggggtaagggtgattaggttttaatgagatgttaaggggcgcatgatccgtcgccaaggagggagtagaggtatcttatacttgtgggttaaggtcgggggatacaagaggaggacgcaaaggaggctttggattgggaagaggggcagcaatgagatgtagctgtagtccaggaatagtcagggaagcagataatttagttaaagtgtctcagcctaataagggaactgggcaggtggggataactaaaaaggagtgcttaaaagagtattgtctatgttggcaccagagttggagagttttaagaggtttagaagcctggccgtcaatacctgcaacagttatggaggcaagggaaacaggcccttgaaaagaaggtgatgtggagtgagtagcctccgtattgattaagaaggggatggacttaccctccactgtgagagttacctaaagctcggcatccgtgatggtctagggggcttccaaggcgatcgggcagtgtcagtcttcagccactaagccgagaaggggtcagtcagagaaccttgggccagagttccaggggctctgggagtggctgccaggtgagctgaacagtccgatttccagtggggtccggcacagatgggacgtggcttaggaggaatcctgggctgcaggaattccctggcctggtggccagatttctggcacttgtagcaagctcctggaggaggaggttctggaggaaggcctggccgctgcagttcaggcatttggaagttcttgtgtgctggagatgtggctggggttcgtctcacagtggaggcaaggaattgcaacttttttctattattgtacaccttgaaggcgaggttaattaaatcctgttgtggggtttgagggccagaatttaatttttggagttttatttaatgtcgggagcagattgggtaataaaatgtatattgagtataagacagccttttgactttttagggtctagggctgtaaagcttctcagggttgatgccgagcgaccatgaactgggctggatttttatatttgatgaaaaacagcctaaacgctatctgatttgggataaagaaaaaggagcattaaccttgactatgcctttagctctagccacctttttaagagtaaattgctggtcaggttggggagggctagtcatggaacgaaactgtaagccggactgggtgtaaggaggggaggtgataaaaggattatagggtggaggagcggaggctgaggaagaattgggacctagcttggcctggcgaggagcagtctggggaggaggggagaggtcagatgggtctgtagaaaaggaaggttagaaagactcagccacgcttggacgcttggggttgagactgaggggacaggtgggagggaaagaaggaagatttgggacgagttgcactgggcacagagactaggaagggaccgatgtgtaaaagaatgcctagacgtcaggcacctcagaccgtttgcctattttatgacaagaattatttagatcttgcaggatgaaaaaattgaaagtgctgttttctggctatttggaactactgttgagtttgtattgtggtcaagcggtattgcagaagaaaataagacacttagattttaggtcaagtgagagttgaagaggttttaagttcttaaaaacacaggctaagggagaagaaggaatggagggtggaaggttgcccatagtgaaggaagcaagcccagagaaaagagagagtagagacacggagggaaggggttcaggggttcttaccctccagaaaagtgggaaagaggttggggcatggaaataagggattggggcacagagatataagaggtcagggtgtggaaataagggattggggtgcagagataagaggtcggggcacagaaataaggtattggggcacagagatacgaggttgggatatttgcccctcccccagaaaagtgggacttgctgctaagggtgaaggagaagaggttgggggtttcttgccccccagaaaggcagagaaggggtgaataatcagagaggcgtccctgcaatgattaaacaccaagggaaggctccttcccagtccgtgactggcgccagagttttgggtccacggatgaaacatgtctcctttgtctttaccagaaaatgaaaggaattgaaattaagagaagggagagattgaagagtggaaaggagaaagtggttgagggatagtgagaaaggttggagaagagagtaagaagaggttgcttacccaatttaaaattggtgagatgtcccttgggctggtgggtctgaggacctgaggtcgtaggtggatctttttcacagagcaaagaacaggaggacaggggattgatctcccaagggaggtcccccgatccgagtcacggcaccaaatttcatgtgcgtccatgtgaagagaccaccaaacaggctttgtgtgagcaacatggctgtttatttcacctgggtgcaagtgggctgagtccgaaaagagagtcagcgaagggagataggggtggggccgttttataggatttgggtaggtaaaggaaaattacagtcaaaggggggttgttctctggaggccagagtgggggtcacaaggtactcagtgggggagcttttgagccaggatgagccaggagaaggaatttcacaagacaatgtcatcagttaaggcaggaacaggccattttcacttctttcatggtggaatgtcagcagttaaggcaggaaccggccatctggatgtgtacgtgcaggtcacaggggatatgatggcttagcttgggctcagaggcctgacagtgacgacatagcagtcagatttcccaaaccagaaatctgacctaacaaactacttttttggtgtgaattagcttatcttaaaaacttagaaaacatttcaattgtacctaggttctgaaaatcttgtctgtgtggttatgataagcataggtgaggtgctggttgagtatgtggcattcataaatttcagtcttcaagacatatatgtatgtctctatctctgtgtacagttatgattttatttctataattcagtttaatatctgactttactcccatgcaacttagtagtaagtaaatcacagtcactttgggggtccccccacctctactaattatgtaaaagcttctggggtcttacctagttccttagcatctggagtgtggccacccaggatgctttctttctctgtgcaaagggataactattgagacaacccttccacattcagtgggtatcctcagtgcttctacatcacacttgggcaactgaaatctttacaaggttttctgtggccctgcctgaatacagacaccaaagtctttctttttgctctggtcttgcccccgacctgggactctaccttgaaaacaggggtcagggcccctccttcagagagcttgcacatttctacttccttttatccttattccatcaggcagggaattctgaattagggaagtggaagactccatacttcctatttctcccaacattatatctgagggaacagagtcttccttctctgttccctcagtcactctgtccagaagatttttttgtttttttttctgcctcctgaccagtcacattctgttttacagagaaatctattttatagttaaattctgattttataatttaattgagtgtactagttcgttttcatgctgctgataaagacatacccgagactgtgtaatttgtaaagaaaaagaggtttaatggacttacagttgcatgtggctggggaggcctcacaatcatggcagaaggcaaaaggcacatcttacatggtagcacacaagacagaaatgagagccaagggaaaggggaaaccccttatggaaccattagatctcatgagacgtattcactaccatgagaacagaagggggaaactgcccccatgattcaattatctcccaccgggtccctcccacaacatgtgggaattatgggaactacaattcaagatgagatttaggtggggacatagccaaaccatatcactgagaagcatttagataaaaattaaatgcagaaaacatatagggtcggtagcagggaaggacggaagaaataaaataggttagtatgacaatcagattgatctcagtacccattgaacaaatcctgagcattgtaggagtttagaagaggaagctctaagggcttcaatgtaaacccttacttggttcctcaagagaattgtccaaactatgaaaggagaagaaggaaaaacaaatcaatataatgaagagagtcacaaaggaacaacataattatggctgaaaagttccaaaagcccagttcaaactggaaaacctgaaattatactagactctttcagtgtgttcagtgacatctctcggaaacatcttagagatatgagaagtattagagacataagatgataagatttatccagaagtgggaactgggatagccatatagaagaggactggggatgtgaagaaccctatgtgacccagggagtatggctttgtaatggatgatcaaatttcattgatgagggaaatgaaactattgaaaatatctgggaataagaaggtaccaagagactggacattgtgtagcggcataggagtgattgcattgatgtgacaagtggaagaggtgggaagtaaccagtttgtggtcagagagtgcaggatttagatttagaatcttggaaatcattctgaagattatgaagtagtaggtgtaactatgctgaatgttgaataaatgaagtagaggtgaagggcattgcatttgaggaagttaaagtaaagccagattcagagatgagtcattattgaggatgttagagttgccaaaaagggattatgattgaaaagaaaactgagccaatgctgaagtcatagaggagagaagcagtgtgaccggagatgtgatgggggcatgcgttaactaggttggggcatatcttcttttaaataatggattgatattaactatggctattttttctccatctatgatataaatatatatcacaaaaaatttgaaaaatatatgtaacaaaaattaaatcctctatatgcactcactcagaaaaacattgttaacatttggtttaccactatctcctgttttgtttttattttttttattgtttctttcttttacaatgaagcactggtactttaaaattatgttttggcattcagacaggtacagctttgcctttttctcgtatttaatggtaaatctcctttgtcttacaactatagacccctacattggcccaacaattatattcattatattcttggagactttaaaacatgtttagacattactatatttctgagaaaaaaaaatggcagcctgggtagagggcatggggatatccttctggtcttgctcattcatttacaacaagtaaaattatgcgagttagtcatcacaccattcctggagatatcctgctgaacatgataaaaaatatttatctgaactcaagaagtttacattctcctgggaaggatataatatcaagatataaatgaaaaggcaatattgaacttgttttagtaattatgatatggaactaaacaaggtgatataacaagaacctggggatgatggtggccatattgttcaattatcaagaaagaccactcatagaaggatgaagctgaagcataagaaagagcaatccaagtacaaagagagagaaaatagatttcagtcagaaggagcagcacctgcaaaggcccagaagtgtgaacttgttgtgttagaagaacagaataatgtctagtctagtgtatgaaaaaaatagggagaatgttacatcaaataggatctcattgaccattattagatttcgttctaagagcagaagaagggtactacagggtgttactctgaagaatcaaaagatcactcatggtaaatggtcttgttttcttcattgggaaaattgaagtagttagaggataatgcccatagactctgctaccatctacccacctaccagtattggcacccacatagtctgcatcccctcccattactatagattgtctctgttccaagttcaactctttcacttttgaactagattctcctctttcacatattcaaggacaaaactccagcaatttttttctctttcatccacttcatagttttcccttcactagtgggtcatcccatcacatacaacaaatttttctctcatttaaattactttaaaaatcttctcttgattctacttaccttttatctattgctacatttatctgttctcctttaccacaaaactttttgaaaatgttcttttattcactgtttctaattcctcttctatttccttataagcccacttaagtcaggctttagtgctgacaagttcactgaaacttcaattgtgcaattactgatgactgccatattgttatacccgatggccgatttttaattctcatcttatttcacctttaactcttaaaaattacttcctttgactttcaagacaccataatctcaatgttttcctcataccttactggtcactctctgtctccttggttgatttctcctttactcattggcctcatatgttggtatcccagggttttctcttttatatctattctcactccgtttgcactcctagccatctatatgatgatgacttaccaaattatatatctcaagccatgaactcttcctgtaattccaaacttctgttcaaatatcctgacaatctcctcttggttatctaactaacatagcaaatgtctaattgacattcattatatgaattcttatcttcccctccatgccttcctcaaccaataaaatggttactttatccttccctttgctcaggtcaaaagccttggagtcaactctgggtcttctctttcatactctacctacaatgcactgggaaatcctgttagctttgcctttaaaacatattcagaatttaaccatttcttacttgattattactggcccccacttacttgatattacaaatagcctcttcagtgagatgtattcttatgctcttgctcactaccatctatacgtctggcagccaggatgatactcatgaagtccatgtttgattgcatgacagctctgttcaaaatccttagtgtcttcctaagtagaacctcttagattaaaaaccaaaattcttacaaagacctacaaggcctgcatgaactgacccctcattaaatctctaatatcatctctaacttacttcttcctaatttgttctgctccagccacctcagcctccctgctagtcctcaagagtgtcaggcatgtccctccttccacagctttgctctgcttgttccctctcttggaatggtccaacccaaaaattcccataacttttacactcatccccacttcaggtctttgctcaaaatgccaccttcccaatgaggcctctgctgactcttaactattaaaattacccagaacttctaattctccttcctctgttctgtgttttctgcagcagttttcatgtaatgcagcatgaacatcttaaactccgttacacattcactttaaagacatgctatcttctaaaatgcaacacctttcttacccataaacttcataataccttggataatctagaggcaaaccctaactagggatggaggatttgacaagctcaactaaactatttctatttcaatcctggctcactagccattctaaccctctcaagcaacatgagaggtatacttgttctaagtatactcacttcccatcctgaccgccccctgccccagtcccagttgttatagaaacggacacttcccactccatggaagaatccgggcacggataacaaatcctgaactaattgcttcaggaagctccttccatctgaggcggatattctgggtgggtttagggcttaggtgatcatagtcaccttcaacgcatgcagtttataggggaaaggtgagtggggcactctgtgataagcagacactgcgatatgtgataatatgatgatgcattcttgagatacctaagtcctaccttgagatacctaagttccagatatgcaagtctgtaccatggaaacatacgcaagcaagcatcgggcctttttgaatggagtaacttcttcaccacctacaagttgggtagctaaatccccaccccagcaaagtagaatgtaagaaagaaggaaaacctatcccactccaaagagttcactggccaaagaattttgtagcatccaatctcggttgcggctgaccaagacaatctgatatggctattatatatttcaaggtcacgtggatttggccacatggaatataatttctggctggagcatgttctttcagaaagttggatgtgttctcagttgaaacactataggttttctccaattgcactgaattacccatcaggaattcctctaagcttggtgacctccttggttttgctcctgcaacgggacttagagtcaaatccccagcttctctttttcagggaggacaaggaattcagacagatgagaacaatgagagagagaaaggtcaccagagagcgaagatgaagagaacagaggaatggcagatacaatatgttagcatataaacacattataattttggccaagattggccctgtcggtaggagtttttctttgcataaagttttctctcagtaaataatagtctactctctcggtagcatctgaggccactgctgtaatgattttttaacttcataagtttcctagaacgttggtccaaatgaaggcaccccagttatgtctcagtcgtgtacctatagtgcgactgttgctgccatctctcagcagtccctggcaatgccacactgcttcaccatcagcttcaaagtgtccttgaagtatatattctgactacattgaatgggagtgccccatctcaacttgcaaccattggattcctgtaggatagaatttgtaaagaaaacaaggtttaatcaaaagcattaagagtctcttcttgttgacaactttttgttctaaggtaaccatatttactgtaaattatttttttaatctctcttctagtgacctacatgtttaaccaattgattgtactttgcatgaaaatcaaagtgttctttccccagtttacttttgttatcagtgcaatgcaaaatctgtttgcctgaattaggttgcatttcattaatctcttcaatatgaaattgtggtggctcatggttaatgagatttaagaatctgtgttacttaaattgtgactaacttattttaaaagtatgtcagaaaataatgattgtttctagtagtgttaaagtattaatgattagtaagtcttggtacacctgactgaactttggttagattaccaagtgtaatgaagtgttcaggatatttcagaattgagttagtatattacagattagtttaatctaatacaagagaatgtggtatctattagaaagacagacaatataaaataccagggaagttcaggggagggagagattctttcagcctagggcactaccctagtctcatggtcatctttcagacctagctcgtttcattcattaattattcattcattcaaacacacatattcaaaacctacaatgtgccaggtattgtgctacatactaaggatgcaaaatgaatatattaccattcctgctcttaaggtatttagtgtatcatatagtcatgacacagtgtttttaagtgttaagctaaaagtatgtacaaagagaaagagaagaggctaatagctccatcttgtgctggggtgacagcaaggagtgttagggacatcacaaggaagaaacaggcatctgcactgcacctcgacaatttgaaggtcaaataatagtcaggtggtggacaggagaagaatggaatctgacaaacggaattacaagctcaaagtcattgttacaagctatgtattggcatttcaaaggcaactcctgttgtcttcaaatatgctttaaaataatttaaacatctcatttatttttaaacagagccattgaactaagactaaacttagcaaatgatttacctggtcacagacgttcaagaaaacagtaaaactgttaaaatgaaaaagtcaaaacaagagtttgattgacacttgtctatttaaacataaccaaagtatatttaagggatgaagcatcctatatgttattgctattgatttttatggctatttattcatattttaagccttatcttaacaattctctgagataggactatagtggaggagtgaaatctcctcaataagaagtataatgctgagtaaattcttgtttctccctatcccctagatttagcagtatttacaccccaccagtttctactaagtgcatgcacacatgtgggctgtacaaacagttcctgggtcctactgtacacagcacagctgccaccagaacacgtggattccccagttctgactgtcctggattctagaactatacacatacagtaagtagaaatgttgtctctctcacatgctggttcatgcaagaatctcagtgagttcaatcaggggaggagcttgtgacataaaattaattttattgtgattaaatgcatagaagtgattagttcagtggatctgggaacctttgattatcacttgccagcctaatttccattttgtctttatgcaatcaggctgagctacataggtacacagattccatgcaaacttcaataaacaaaaaactgaccactttcatgactgccttgaatattttatgtttggggcattatttgtaataatttggaattagaaagtatgtatatctttttgagtatagtccaggaccttcttattcccttattacctgcagttgatgtcagaaaggaagtttcacatataggcatgttctgatgatttctggtattactgattcttgtccatttcctgatacctgaggtataaggtgtactattgtgctgagctaaaatctaataggtctctcttatcaagagttaatacttgttcatatttatctcttctggactcagttttcttatctgtaaaataagagtttagactaaatgaattctgacatttattcaagccgaaaaatattatgattcagatctcattgttccatgtctaaattctcctgttggcttcattgtgcccctaagccaagccacgttacttagccaaaaagatttcccacgactcaggtgtttctcagcttaacaatttcctgtctgttctatgacttgcccttctcatttccactgctaagttgtaaccctcatctgaaatgccctctgttcttccttctacctatccaaatccaatccatctgttaagaataaaatcttatgtatctaagtagtgtgtcacttcattcaagaagtcctgcctgattttttcagcccttccagtcatcaatttcactgttttctctaattacatattaaccctgtgttggattcctggattttccaggacaattatattattccctcttttccccatatctaagttctcagaagttctgcttctgaagtttttgttctacagcttaaattcaaaataaatactcgcttatacatttttgtattgttagctaattaaaattacaggtaaccagatggcaggagccatatcacatttcctttttgcccctcagaataggcattggataactacttcagtgttttattttaaatgaatcaattttgagatttatgttttttaaaaaagtgtcacaaatccaagttcaaatgtgtcctttgaaaatcctgtatattttagttttgacttgaatgaatgataataatgtattttaccattcccaggtggaaacaaccaagaaaaataagtgggattctggaacgctatgtattatatatgtcaaaccatacacatgattttacaatttggagtgtcatctataacagtacagaacttttccaggatcatatgctacaatacgttttacctggtaataaatatctcatcaagctgggagtaagtttatttccatcactttctctgtccccattccttccacttcttctccccttcccgtggtccatcttttctttctctctcacttaaaaaaaaaaaagtcaaaatcttcatgtattgctgtttatactgaaaactctcttcccatcctaaatgtgaattctggtgatctaatacctacacatttattttatattatgcaaatgatagaataacaccctgagtcagtagattttcccaagtcaaagttgggattatcaagattttcaaaattacttgtagaacatcataattgttaagaactttttctaaagtgctaggattcataaggttatttccctgtggcatttgtattcatttaaaaaacaatgcacagtatgaaaatttagatcttatatttttaaatggaagtttaaatgaccgtcaaatattcttgattgttattacattctggtttatattatgctcctatctcagaagaacagtcacttaataaaaccccagaatcaacatagtttagaggttcccttagacaaacaatagcattttttaaatgcaaaaatagcacttttacacaaaggtcttttaaaagaccttgatattactgtggaatttatactcagtaattccttttgttttttgatgaaatataatcttttttaagtttaatagcacgtctgaaaataactgaatataaacatgagattgtccctatttgttttaaacacactcttcattttatagcaatacctatataaggatatttgctttgataaatgccatagaaaatattctgctcttgattatgaataaatttacatttatgtagacactgtgtatgcattcattttacttaacatgctcttgaatgctctaaatattataccatgagaaaataaactacactcaactattgctaactgtctgacttaacaccacaaaacaagggcaatcagacagtggttaaaaaaatactgttcaaaactgactccatgtgcctaggtgttctgcacagcagtttatgaaacagcactttggttatgtacagttttattacccattaagtaagaaatatactaacttgattttcaaatgctaacacagaaatacaaactattttcaaaataatggtagtatcaaaattaggaagagtcttaattttttggaagcaaccaaaactaaaccaaaaattgtgctcttggttgtttatcagaagtaggcaaatgacatagaacagattctcttcctagggccgtttttaggatgtgctgtgcagtcaatcaattcatatcaatctcctagattttataaatctataataccttgaaaaatacatactagtagattaggagtcctctgccctgagtattaattcagattttactacaaactgtgtgacctaaggcaaattcacttaacctcactgagttttattttcttcaagtctaaaattagaacattgaactaaatgatgtttaatgtctctgagccataaaattctatgatgctaaaaaaagtaatcccaaacactattctatggagtcaaatgctatctgtcagccgctgaatagtgttgatgcaagatgttataaagatgtgaaaatccttgccttaactcttggtagggaaataaacttgctcacattattttcaagttcactatatttattagggcagaaaataatatattttcagggaggattcaactaacagggtttttacttaactctgttaagcagtaaattaaatgaaccagaacattttaggttcatcctggttaattgagggattattgtatatttcacagtttcaatataataactggctttcaaggtcattagattagtagatcgagagcaggttctcagcaaagtggagttgcctttatagatcattttagcatgtcgactaagagctggaaaacaaaacataaagataacaaagcctttaagcagcatttggaatagaggaagctacacggggatttgaaccactatgatttaccctaggcttggagcaggtatgttacttcatgtaacgtcatttagttttcacatttgactggattataaactgctgaaacataaggactgaatctttcaaaatttgatctgcagtttcaagcacagggcctattggaaatgggaagctgagcaaacaattcctgaatgaatgatcaccaaggacatcatttcataaaggttctaagacttttgatatgaattaaataatttgcttggaaacactggaattaggaatggtgtggttccaaaacatactctttccactgcaaaaaaaaaaaaaaaaaaaaaaaaaaaaaaaaaaacataatatgttgctactctcaacaaaggctattttgaaatgtgataaaatgtgatagctcctaataaagaagacaatatgttaaaaataaaataaagaagctattaatacagacagctatcaagacaggtgttgcttgataattttcataccactgctagccatttgtaacttgatgaattctaagtattatatattcctgaaagattcctggaagtggcttcactttttaagtaattatggatcaagtggcctttttctttttcttcgtgctttaaaatatgttgcactcttaacatccccaatccctgtggacctgaaaacttactggaaaagagaatgctagttttggtccgggcacactggcttacatctgtagtctcagcactttgggaggcccaggtgggcagaccagttgaggccaggagttcaagaccagcctggccaacatggcgaaaacccatctctacttaaaatacaaagaatagccgggtgtggtgctgcaagcatataatcccagctactcgggaggctgaggtacgataatcccttgaacccgagaggcagaggttgcagtgatctgagatctgccactgcactccagcctgggcaatacagcaagactccatctcaacaacaacaaaaaaagagaatgctagttttggattgtcttaatagtcatgatttcaaaaataattgataaaattttattatttatgcattttattgtaccaaaattgaatcccttatttggccagatgttactcatcatttcaaggcagagttatgcctttatgaatttttcaaaatggctgtaactgagaaaagctataggcgatggttaaaacaacttattttaatggctctcaggctttcaaagaccttgctatttcataaaggcatttttaatcaaccccactattttgtttagtttttccagaccagaattttaatcagcattcagctgtattgaatgtagtggcctctggtgcgggcaggtcaaacaagatactgattggttcaatttcatttagatgatgtcagattagaccaattggaagcagctttaagaacatttattttcccatcaaaggaactaagataatgtcctgcttacttaggaccctctaaatgcatccaaaaagaatgtgggcaaaacaaaataaaataatttgcaggtaattctgttatttcagcagcctctttataaataatttcatttacaagaaaaatgctttcataaatgccttacattcttaagagatttctttgtcaagttactggtttatggatctcagatgacatagtagatgaaacagtccttctaaaccaaaggatgcttttacttatcctagaagacatcataaaatcctcaaagtaaattttaattcacactgtgttttaaaaatatatacttatatgttgtatagtatagaatttatttggggagagttagcaggggaaatattttagtatacaaataagaaaaaaatagtgacaagtagactatcagaattaaatcccagtgtgttacaagtttaacaataagaagctgcaacatttttcccttctaaggaaaaaaaatctgaaaaatgcaaatggatggattttttttctccctgagaagtgggaaaaatttgtctttgaccatttttcctttgataactcagctgtctcatatggcctcttttcctgccatattttctggtggacttttagcacatttgaaatgtctggggtcttcaactttttttctattttaatcgttgggcaattattttttgagctcacagtgacctgtcctaaagctttgagtcagagtttggccacatttgcaaagattccattctctagaggagtatggtttttttcttgcacagaaaggcacatgccacagctgagaattagaggaaacccacagaggttaattaggtacccaatcttaatgcaattttcatgctcaggccacaatttaacccatctgaaagttgcttaattaagctggtaagaaattatcctgaagacatgggctattgctatagtcttgtaatagcaagtgagattaatttccatgtttgttgaccataaactgttgtttatgcttataatgaagaatttgcaactagttgcaacaactttgcaaatagtagtgtactcccatatttaaaaaaaaaatctaaaaatcagtcagcttccttctgtctttggggaaaagaatatcgactactttaagaatcacaaaatcactcactcagtatcaaactgaaaaatcagagagacgcctaaagaaagagatgctttaattttttatcttagtaatatctgtcttacacaaaaatgagctaaatatctctgcttttttacattgtcttatgattttgctttattttctttttgattttggtaaaatttagtgccttttgaaagatttttaaactttgttgtatcaattgaaattgtaacttgaagagatactgaaccaagcttaagtatagttttcaaatatcattgttatataaggatataattactaatatttgctagcaaatatgggctgaaaaccccttaatgtatttatcaatttcctggagaagtgcttgtccagtaagtttaaaacattatttgcagtttattatgaaattgcacacggaagtttctgtaacattcatgttaccatttctgacattagtgatacttaattagggaacagagagttctgtgatcatgttaaatttgtcaaacatgttttaatgaagcctatctactctgacacataagtaaattatgtgatcctttaagccattaaacattcactcaaaaattgctttgtatttgttgttttatgagaaacattgttttatttaattttatttggtgttatgctataaacatattggtcacactgtagaaataaaaggcaattgtatttgctgcacatcttttcttccctagaagtcagttgttttgtcttaaagtagtcttcatcctctagtactttacttatgttatgtgtacacatgctgtgtgtgtgtgtgtgtgtgtgtgtgtgtgtttaattcactctgggaacctttgtgcaaggctaacttcagcagggctgtttatccagtcaatatatgccctacatctctaggctctgacttaagatgcttccttaattcatacattcataccatctcagttattctctaactattggggatggctatcttatgtcttaaaaagcaaattaaataaatgttaaatcttaacactgaaatgaatttattttggggaagtaaaggtagcactatataacaaaatctgaaactcttattatgaattctctttcctcaatgttcatgaaaacttttgggaccaagagtgaaatgagcatttttgcatctctgtttaggcttgcacaggtggtgggtgcacagtgagtgaggccagtgaggccctaactgacgaggacatacccgaaggcgtgccagcccccaaagcccactcatattcacctgactcctttaatgtctcctggactgagcctgaatatccgaatggtaagtgaactcttttagcctcaagttaaaaagatgattagcaaaggtaaattaatattctaaatggcagcttatatgtggtgcttaatttttaatgatcattttagcacataaaatacctaagatagtatcattgtctctagttggggagattgtggtttttaggctaacacacaattttggtggctcaaaagtgctcccttttgatagtttttgtgtactgcatctcattgtttaatatgctccaggagaggtgaagagagcaaacggggaggattcccaaagaatgccgtagtgagagtgacattgtattttcaatgactttctgtttttaaaagccattagttcttccttggcgaaggagagaggtggaaagttcatgtacatattgtgtcaaaacgcttttgatttaataagtttatcttaaaagaggccacttggaactctgtattttttaatatactatttataaatatttcaacatgctgtttttaaacaatgcatagattaaacatacatatatttatacatatttagctggaggcaagttttgtgcatttctaagcaatatatatgtttttgtacagtttagtgaattaagctagtcagttacgtttcactaaaataaaatctcattatgaagaatttgtaatagttttgggtagaaattgctttattcatttagtggaaatatctttaaggttcatataacatagtaccattgtttcacactgatggaagcttacttgacattaaatttcattcctctttgagacaaatatcaagaagacttttaatatagaaactcttttaagaaactcattactgaaaattgaaatgggctcttttagcacagccaaaaagaatgaaagaaaaaagttacagttttattagtttgtcttatgtttactatgatattaattattccagccatctcattttaattaaacttttggcaaatgcactagatatatttgaggtaatggagagaattctaataatcagagtgaattattatctctgctattgaagttattcctgtactattacaaattttccaagaaaaaataaatggatgcctatttgataccatattaagcaatcaacaatcttgttatgcttcttacttcacaaagtaccctagttcatagatgacaatgaaaatgttaatgatttatttcaattggattgctgtgaaatgctgttacatgatttgcatagtagagcacttcccttcatcccaattggttaatacaactagaactacaattgctctcagaatcttcagctgttcagggaaacattttccacattacaaagctctttgaatgttttgtgtatttgcgtatgttttgtatatttgcaagcagttttaaaatgtactcatcaagcaagaagaatttgggagattttggagatttgtattgacacttccatggtattccaaagtcttgtgtttaattagagtgggatttttagaactttaattgtggtacaatggttagacatttaaaaggcagttttattttttttaaaacgactttttttgtttttactacttctccccactttcccccaattttttagctttttgtttctcttgttgattgtctagagagggataatctgattgttggaaaacatcttgtctctccatctgtcttcgaagtccccacacctctcctcaaatacccaaagaataaagtctaaattttttagtctggtattcaggttactaccaacttgtgactcaacctgaatacacattgccttataacatatcttcctttctagccatgctggaatatttatggcttaatgttgggttggaaaacatgggtggagtcaaataggcctagagtcaaaaattgtttctgatgtatagtgactgtgttacctcaggaaattcattaacttccatggaccccaatttccttgattagaaaattgagattaacaggctgggcctggtggctcacgcctgtaatcccagcactttgggaggctgaggggggtggatcatgaggtcaggagatcgagaccatcctggctaacacagcgaaactccgtctctactaaaaatacaaaaaattagccgggcatagtggcaggtgcctgtagtcccagctactcaggagggtgaggcaggagaatggcataaacctgggaggcggagcttgcggtgagccgagatcacaccactgcactccagcctgggtgacagagtgagactccatctcaaaaaaaaaaaaaaaaaaaggaaaattaagattaacaatccctgtcatcaccctgtccttacctgtagaaatacaactcattcttctaggctaaccgtaggcctcttattccatgaaatcattctactcttccttaagtttaaagtaaactttccctcttctcttgactatgtgaactgtttctatgccttcataatggaacttcattcagcctgtgcttaaagttatttgcgtatatgtcaaacactcccaccagatgctaaggaccataaatcattaatttctctttcactccgcagagcctaacacaatgttctactttttattggtacgcaataatatttaattcatttaatgtttcttgtggaaattacctttgatcagtggcatatatactccaaagccctggctctttaatgataccaagagagatgatagaagtacttaccatccagtgtctgcaatatatttgttcaaaatgcatttgttcctaaaatatatttttctagctgtgtagattctgaggctgggtttctcttttgagaataccgatcttgcatttgaccaaagaatttttaattttcttttctggattatgcccaattcaaagttaatggtaccaggctcacatggcaatatatgctacctaatggttgctttctaatttctgaatatgctgctgaagagaaatacaattggagaataagatagacttcattcttgtgtaactaaataaaccctttcaaaagattttaaatggtatttctcaaacttatctgattcttagaacaatcttgggagcaccaattgaataagtagattctaggctccaccacagacctcctaaataatcagaatcttccactgcctcggttatcatcaaaatacccctgggtatttactacattttccaactgagacctctcacaaaatcctccccctggatttttgttacatcttaaacccagcatatccaagttgatttctcctcatggtctccatctctctgcttgctctttctcctgtattccctctctcatggatttgcaccacccagccctgccagccagtatactgggcagcagtcttcaccttaaaccttgctcacccctgactgctgtcaccacacaacccctcgactgcacttctctagtgaaggccattaatattgctcacccagatcgcttcaggagcctcctcatgccatgcaaaaaatttgcatttgttcattcaaaatatgtattttgatgacctactaggttccttcactcttatctatacagtgcatttccttgcttcttgatctcaaggatatcagagtcctcggggaaaatatccatataaatgaattctcacaaggtggggaggtgcacaaggtgccaggtacacagagaagcagctcctagtggttccctatgagatgtggacatgtcatccctctgcatcctcacgaagatgttgcaggaccagatatagacatgtgtttagtctgaaacaggtattacttgcctggttttgcacactcaggtttcaaaatcttgactctgttaatcagttatgtacctaaaggtatgtttgttcactagggatttataaacatgaacaaagacttgttgagaaaaattaaactcaatttctataatgagaactaggtatatttttatgcttgcctatatatgacaaaatatgaaaggtataaaaagttctaatataaatgtccagtccttgccaatcaaacaattggtagcctttggccagcgtggcttaggaaacattctgtccttgtcataactgattctgacttaaatgatcatctcctactcgtgaaagtctgatggtaatccttaaccaatgctttaagaaaagatcctctccccttgttatttcagttctcttccttgtctcccagcctggtcctgctccacagtgtctgtgctggaaagcttgctagttggttcagtacatacttcatgagccctgagaatttttcctaatttggtgtcttttgttcagcagtgtaccagcagctccaagaatagtgcctgagacataataattgctcagttaaaaaattgttgattaccattattaaagaaaaaaacagaaaacaacatgttctggaaaggatgtggagaaactggaacccttaaatactgttggtgggaatattaaatggtgcatctgctatgaaaagtagtgtagaggttcctcaaataattaataatagaattattagatgatgtagcaatcccacttcttgaaatatatccaaaagaattggaaacaagatgcattgcagcattattcacggtagctacgaggtgcaaacaacctaagtgtctatggacagataagtagataagcaaaatgtgatatatttacacaatggcatatcactcggccttaaaaagaaggaagtcctgtcatacaatatgctctggatgaaacttgaggagattatggtaaatgaaataagccactcacaaaaagacaaatactgcatgattgcacttacgtgagtttatctatagtagttgaatgcacagaaacagaaattagaattacggttaccaaggtctgggtggaagggggaaatggagagttgctgttcaatgggtttagagcttcagttttccaagacgaaaaagttctacaactctgttgcacaaccacgtgtatgtagataacacaatggtacacttaaaatggttaagatgcccaattttacgttgtgctttttactgtaataaaaaaaagatacagagaggatgtaataaaatgctataaactaaactagaaaaaaagattaagaacagtgttagtttaaaacaaaaaaaaattgctgattaataatcacatagagatctatgcatgaagtatgcattttttaaacaagggtgagctcatactatttgagttgttgtggaatttacttttctcacttcacaatatggtgcaaacatctttccttgcagttcagtggaacgtgacctcattctttcaaaaggcagtatgcaatcccactgaatgaaactacagcttacaagacccatctttttattgatggacatttctgtggtttttgctattacaaacaaggttacttgctattaattgcctcagtctgccaagtacagtctttaagtactgagtcattatcacttgattcacacctaaggctttgcttgccttcaaatatgtcctgcttaattctagtcccttgcttcacatacctgcaaaaatgatggtgtgacactccagctctgtttctctaatcagagtcctttgcacccacgttccctctggcaaaggtgttctttacaggctgtgatttcagacatgattttaaaaccgctgaaaagagcgacttttaggtccaaggtctataggaacccttattatgtaggaccttgacgcttcctttgtaagaccattagctatcacagagaagtagcacaaaggattactgtctaatacatttgtgacctgtattgtgtagattgcaattgcgtaattaaagttctgcttttgagagcttccaaattctcatgagccatattcctttttagaagcttaggccttagaatcctgaaatatgttttttcttcacacttcaagtctaccttgctaaaacagcatagctatctgactatgccaaacttattcgtcattatctagcataacatttacagtgacattttaaactaattagaatatgtgttttttttaaatactaactaaaaatatagaatataaaatgtttatcttttattaatagctataattccttgtaactaacctctatctttacctaagtaaatcgacctaaaatagtttctttattagactgagccccatgagggcaggaatcatatgtatctttttcactgccctagtcctggcctttggcagagtgccacggagtagaggcatcttataaagctgtcgaatgaattaatatttaccgatgatagggacaataccaaaattgtaatagtgttgatgtgagaagcatattcatatgcaatcatacaacatacacaaatgcacactgtgagcacatttgatgattatgtaatataggtgggatgatttcaaagacagcagagaggaatcttcctcttggcctgctgaaggcttaaagcacacacttagagacctagtccttttgcttaagatttcatcagcctggtaatctgtagatttcctaatgaaagacagcacatagacttgtcttgtttgtgctctgcatgtctcagtatgaaaggatatgtttttactgtggtcaggatttgttaataaccacatgggcataattaagagagaagcatgtggctgggcgtggtggctcacccctgtaatcccagcaatttgggaggtcgaggtgggcaaatcacctgagcctgggagttcaagaccagcctaggaaacatgatgaaaccctgtctctaccaaaaaaaaaaaaaaaagaaaaagaaaaaagaaaaaaaaaattagccaggcgtggtagtgtgtgcctgtagtcccagctacttgggaggctggggcatgagaatcgcttgaacgtgggaggcagggtttgcagtgaaccacaattgtgacactgcacttcagcctgggtgacagagtgagaccacgtctaaaacaaaaaagagagagagggagaagcatgagagctgggcacccattagacatggtctagcatcttcttgagaagtgaaggggacctgagaagcttatggaaatattttcctaatttagtctttcatattggcccatctttgtgagaatttatatgtgaacatatgtcaaaatggtggcaatcatgtcaaaaataatagaaacatcttagcaggttgattatttttgtagacttacacgtagtaccttgaagacaatagaacgttatttaaaaaaaacatttggctcagtgttttgagcttatatattctgtcaataatgggtggtagagaaatcaattaactataggtctcttatacacactctatacatgttgtccttcacattaagagatgatgctatagaaataagttttcataatgtatgcacatgaagatatatgtataaatacaaattaaatattctatgcatgcatagaaataaatacttgatttcctgttaacaataataacattagtaataataataatagctataatttataagaatttgccaggcactttaattcccataactagcccatgaaataggtattgttatctcacaaatgtggaaacttagatttataagtattaaacagtttaattattcaaaatcaagacagctggttaagcagaaagattgtataaatcaaagcaaggtgtgaatgacaaaaattcacggttttattcactatattatctgcctctactttttgtagaaaggcttataatgtagaatttaatctagctgtatgaaaacaaaattttgttacttttacttgttcaatgtcctgttcttagtgccaatatttaaaattcataagatctgtgttctggtttttctctggttttggagagataactgtttgatatttcatttgattttcttactttttattttaaaataactttatttttaaatggtcaaaatgtgattctattttctttcctggaaatgctcagttttaataagtgaaatggattatagaactcagcgaatcacttaggaaaactgcttgacagttttgagcaaaccttgcgtaacttttatgaaacacctccagtcagtttgtcaggtagaatttcccaagcacagtcttttttagattccgttgattccatttttaggagagcataacagtaataaggcattatcccgcaatgtgaaagctcttctctcttttcctttttaattgaaggatcaagtattcacacagggagatatctgccacattcaatcagcatctggaccttgaggggagccctcagttcatattcctattgccatgctgcactggaaaagacaaacaaatatgtttggagcatctatattcactacacatgttatttttatgacacactaaagcattgttgtttaattcttacagtaaacacaattcttcagcgtaaatagagataccttgtattaaatttacattgtattgtacttgcattgaatttccttggttatatatgacaacctattgagcaccttaggaaatacaatttgacataacatgatgaagaggcacaaagatatatatcccagtggatatgctttatggacaattatcatccagcttccctgtgaaaattaaacaccttaaaaaccctatcattatggaaacagaaaggtgataaacttgaaactccttctgttgtacagccaatgggaattaagtatccattttgtggattatccattgaagaactgaatgtctagaactagattaaattaaactgaattaagccagaacctgaccccctttgccacatggcatgttacagttttattttgcttcagctgtcttactgattattagtgccagagaataagcaagaaaaagcctgaaaaaatacaatatggtacaatataatagagtaagtgattttttatggtgaatatttctcttttgcttttctagattcactctttttcaactctgccccgtgccctgtaaggctgaaccttcctcacagtggcaatgggcttcctctctctctggcttcctgttggtttgtccatgggcagcaacggcaaaagatgagagggtgagaggagcatggagtctcagaactcattctccctggctctctttctgcatggctctggattccagggttgcattcctccagtaaaggctacatttcctatttgaagcctctttctttctccaggttcctgaatttgttctcaccctttcctctaaaaacataaagaagtttactggctcctagccaactagttaaaatggtctaggaatcttagctagtactagctgggaatgctttattgtcactggttgctttcccttaaccctgtccgcatctttgtaaataggagttccactaaaatcttttccatgccatttgagttgtcattggtttcctgttgaaaccctgactcattcctaaattttatttaatccacatttaacacggagaggtgttttttgtgtgtgtgtgtttgtttttttgatgggggggtagtgcgtgaagataaatttaaaatgactttcttcatgctaagagtggcaagaataaataagtaaatgaacaaaatttccattttcttaaactttgtttcaatacaatagacatcttaaaggccaataagaagagccaagctcaaagattctagtggcggcttgcttatctaataaacccatcatatttaatttttcaaataataatcaacttattgatatatctttgaaagcttttcacttattgttataaaatatttctttgttatcattagtgaaataatggcttatgacatcttcctcttgatgaagtagctctgagtgccaagtttagcttataggtcagtttcggccaggcgtggtggctcaagcctgtaattccagcactttgggaggctgaggcgtgtgtatcacctggggtcaggagttcatcaggagttcaagaccagcctggccaacatggcgaaaccccgtctctactaaaaatacaaaaattatctgggcatggtggcaggtgcctgtaatcccagctactctggaggctaaggcaggagaatcacttgaacctgggaggcggaggttccagtgagccgagagtgtgccattgcactccagcctgggcaacaagaacaaaactccatctcaataaataaataaataaaattaaataaaaatcaaggtcagtttctcagataagccctattacgtatcctacccagactaggttagcatccacctctcccttctctatcccatgttttccttctatccatctgatttttaaaaagtaaactttacatcctcataatacctctaatgtctgttctttcgcttagattgaaagttttgtgaaggaagtaaccatgactgttctgacaacttctgtattaccagcatgcaacacaatgtctggctcatagtagctaccccatagttactgatgagccagatgactaccagaaaccaaatctaaatccagcagacttacaaaaattattttacagtatttagtaaatacttgtttctttgcactttctggacttcattggaaaggaatgaattttaaatgaaaagatagcatacaaatataagaaactattggctaatgacagatagtgtgccacggaggaatacagacctgcctaagcttgtttttgagagatgttagtttagtttttacaagagaagtgcagcacatgacataggtcagaattggaggagatagtctaaggtgagcttcctatagcaagtaaaactttaactcatactagaagcaaggggacagttctgtgtgtgtcccttctatgtgcacagtgcttattactaaagcacattcatatatgctcacttgtttgattctcagatcaactgtcaggccaccagggcaaggaatattaccccattttgttggtcaagaaatgaaagcttagtgagttttgctatctaaccaagttttaaaggtacgtggtcatgacagaagggctgaagtggttggaggaagatccctgaaaaagaagacaattggcttggaagcttttgactttgttttgaaatagttcccagaacaggagacgcactcaagaactaatttgttgattgaatgattacttacgtaaatgtatatgcacaaaattgatacttcaaaataattggccatacaatttatcctgttctgcaacttgctttttttctctaattcacatggagtaaacatctttttatgtcaatagcatagtgctccctcatttttcctcaaagcttagtaaaatgccattgaatgaaaccacaacatttatagaggctatctggtaaatgattaatatccattccttgctacagctacatctcattaatgccagctaaccattaattataaaagatgttgacaataaggtttggtgcttggactagtagatagtcctcaaatggattctcatttatttggatttggtatactccttgaggtagtgttgcaaggagtgtttagccaatagttatatcctgaggagtcctcaaggcctgaggagaggaccctgaactagctgttaagcctcctcctctaaaacaaagtcaaacaacagggttgaaagtcaaagaatgaaagagaaaagaaagctgatgtgcctattttaatatcagacaagactttacagtgagtagtattattagttataaaaatgtagtttcataataataaacgagttactaaaattaacatttattttttatcaaaatatactataagggcccacaaagataaataataagagagatgatatttagaacacatgtaaccatcagaaaactgtatccagaatatataaaacatgcctacacatctataacaaactggagttaacatctgaaaagtcatttcacaaaagaagaaaaattaaatgtctgataaacataagaaaatgggccaacttctgtaataatccaaaagtaaaagataatacccaaacaagataccattttttacatctaatactggcaaaaatttcaaagtctgacaataaggtctttttgaggatatagaacaatgagaactcacatggactcacatgtacactagaattgacatactttcaaaaagagatgagcattgtctagtaaaattgaacatatatcaacaattcctctccaggacatttgtcctagaaaatttgtgtatgcgcttcaagacacatatacaaaaatgtgtataattacattgatgtcatagccaaagtataaaaacattctaaatatctatcaagagtagaataaataaataacatttgccctgtaggaatactacacagtaatgaaaatgagtgaagtatggctactctcaaaaacatgtatagaacacatgaatatcatgttacacaaagcaagatgaaaaaattatatatacaacataactctattaatataagttagaaaaccatgagaaacttaattatgttgttaagggatgcatttctcagtagaaaagcaaggacatggttcttcaaaagtcctcatatttatctgtgaggaagggaaagggatccaattatggacaggagatttctggggtgctggcaacattctattttttcaacgtgagtgatggttacatggccttttgcttttaaatttgtcattaaaatagaattgatattgtatatatttttatatgttatgttttattacgtgatttttaaaatgtagaaagaataggtatatggaagccgtaaagttgtatgcactgtagagtctgaatgcttcagtgccgacacatagctctaccacttcctagctgtataacactggccaagttaccaaacctctctaaaagcttttcttgtcatctatttctctcatctaaaatagaacccattccactatcaagagtttttcctgaagattaaatagtacttgattaaaacgctcaatccagtgattattgctttagcataaacttctttggactttaaagtgtttgtgtcttcttacctggcatgctcccctgcacaacagtattttttaatttaaatattttattttgagataattacagattcacaagaaattacaagagacagagattccatgtatctttaattcagtttctcccaatgtcaacatcttctaaaactataatacaatatcacaactaagattttaactctgatataatcaagacacagaacaattccatcacaagacatggtttcttcttatcctcacactgaaaaacaattccctttttaaccaggaacagaagggtaagttagtactttggaagtaggcttttatgagattaacgtcattgttcatgtttgataaaggaacactcttttctgaatagtgattttatcataccatattgcaatctaacacattccatccctaagtgtcacaagttttttttttaattaaaaagaaagtatatataactgctaaagatatttcttctgccacagactactgctgaaatgcagcattcccacatccctgcctcattcacgactacttcctatacattcaggaaaagacgtctttaataattatttttcctgtttgatatttttaaccatctcactgttactacctgcatgggcttccctactccagtctattttacatgtgattctagattattttttctgtatatgactttatcttgtcgctagtcagttcataaaaacactaatggtctcctgtgcatcataaaatcccaactccttgtagtgtcattcaaggccccaaattccctttgaagttttgttttctattagactttatcgagtgatatggtttggctctgtgtccccacccaaatctcaccttgaattgtgaaaatccccatgtgtcatgggagagaccccgtgggaagtaattgaactatggggggcatgtttttcccatgctgttctcctgatagtgaataagtctcatgagatctaatggttttataaaggggagttccctgcaaaagctgtcttacctgctgccatgtaaaacatccctttgctcctcctccaccttctgccatgattaggaggcctccctagccatgtggaactggggagtccattaaatctctttcctttataaattacccagtctcaggtatgtctttattattagcatgagaagggactaatacatccagctacaggaataacaacagattattgatctatttgggatacctttactgaaccttgcactttcttacttctaggcagtggcaaatgtcattttcctcaccagaagcatcttcctgagacataggtatttcacatattacctttcatgggagacttagcttcatcatatgacttattgaagtccccactaccgtatgtggaagacttgactgctctaaaaagcctgtaacacttctttagccagagtgattattccctgctagagggtcctgtacctactgtctactatttaattatgtcatttgtttggcataaagttgttgtggtgcttatgatccttgtttaacccttgaattgttatttaattatacctatgtttaactcttttcttacttccataaaggtagatattattcttattctgttcttacttcccaaaataccaagtatagtactttgcacttgattgactttcaatatatttatattaatctttttattaggcttatcttgattgctttgagaaccagagcatgttcaccagttcttaattcaagtgaaattcctaaaaattttagaagaggaaattagaccagaaacatataacaagagtagtgaccagagtggggtaagatggccagtttccacaactaaatttatatttgtatggccctgtaaaatgggttagcccctctaagaatccattccctcctctttacagcaatgacaacaacaattcttattttttggagttgtcagtgttaaagaaaataatgcataaaagcatgtaccctattgtctgtctcaaagtaagtgatcagaacattttaattttcttttttaagaaaggctctcactttgtcacccaggctggagtgcagtggtgcaatcatggcccactgcagcctcgacctcctgggcctgagtgattctgccacgtcagcctctcaaatagccaggaccacaggcacatgtcatcatgcccaactaactttttgcattttttgtagagacagggctttgccacattgctcaggctggtctcgaactcctagactcaagcgattcacttgccttggcttctcaaaatgctgggattataggcatgagccaccatgcttggcctgagcatattttaaattactttaaattattttgggctggtggcagtggctcatgcctgtaatctcaacactttgggagactgaggagggtggatcacaaggtcaggagttcgagactagcctggccaatacagtgaaatcccgtctctactgaaaacacaaaaattagttgggcgtgatggcgggcacctataatcccagctacttgggaggctgaggcaagggaatcgcttaattcgcctcctgggaggcggaggttgcagtgagccgagatcatgccactgtactccagcctaggctacagagatagactccatctccaaaaaaattaattaattaatttaaaaaattattttaagtattctataattttgaaaatacttacatggcatttcaaggactcaaaatcttactttccccagagctactcataaatcaaaactttgtttaaaataaatgaaaacagaggtacaacataccaaaatctctgggatgtagcaaagacagtgttaagaggaatgtttattgtgctaaatagctacctcaaaaagttagaaagatctcagtttaacaaactaacatctcacctagaagaacaaactaaactcgaagctagcaaagattttttttattactgattcaattttcgaacttgacattggtctgttaagggttttaatttcttcctgattcattctttggaagttgtttgtttctaagaattttctctgtattttctagtttgtgtacatagaggtgtttataatagtctctgaggatgtgttttgcttgtttgttgttgttgtttttggtaggaactgcctcccctaccccgccgaaaaaaaagaaaaaaaaaaaaactggaccaggtggattcacacccaaattccaccagatgtacaaggaagagttggtaatgattctactaaaactgttacaaaatatcaagaaggaaggactccttcttaacactttctatgaggccagcatctctctgatagcaaaacttgtcaaagacacaactaaaaaaggaaactacaggccaatattcctgataaacatagacacaaaagtcctcaacaaaatactagcaaaccaaattcaacagcacagcaaaaagttaattcaacacaatcaagtaggcttcattcctaggatgccaagtttggctaaacatatacaaatcaataaatgtattcataaatctccttgagttggaaatatatttaaaaacatgattcatcatataaatagaactaaaagcaaaaatcacacgatcatctcaatagatacagaaaaagctttcaataaaatccaatataccttcatgataaaagccctcaacaaagtaggcatcaaaagaacatacttcaaaataataagagctatctatgacaaacccacagccaacatcacacagagcaggtagaagctggaagcattctatctgagaacaggaacaagataagaatgcccactctcaccactcttactcaacatagttctggaagtccttgccagagcaatcaggcacaagaaagaaataaaagaaatcctactaggaaaagaagaagtaaaactatctttctttgctgatatgattttatgcctacaaaacccaaaagattccaccagaaagttcctggaactgacaaacaacatcagtaaagttttaggatactaaatcaatgtgtaaaaatgagtagcatttctatacaccaataatgttcaaactgagagccaaatcaagaatgcaatctcatttacaatagccacaaaacagtaaattcctaggcatacatccatccaagaaggtgaaagatgtctacaaggagaactagaaaacactggtaaaagaaatcgtgtatggcacaaatggaaaaatgttccatgctcatgaagtggaagaatcaataatcactaaaatggccatagtgcccaaagcaatttacagattcaatgctatttctatcaaactaccaatatcatttttcacagaattaggaaaaagctattctaaaattcatatggaacccaaaaagagcccaaaaagagccaaagcaattctacacaaaaagaacaaagctggaggcatcacattactcaacttcaaactatactataaggctacagtaaccaaaacaacatgatactggtacaaaaacagacacatagaccaatggaacagaaaagagaatctagaaatacagctgtgcacctacagctatctgatcttttacaaagtcaacaaaaataatcaatggagaaaggactgcctattttaaaaatggtgctggggtagcttgctagccttatgcagcaaaccagacccctacttttcatcatatacaaaaactagctcaagatggattaaagatttaaatataagatctcatattataagaatcctagaggaaaacttaggaaacaccattctggatgttgtccttgggaaagaacttatgaccaagtcctcaaaagcaattgcaacaaaaattgacaagataaacctaattaaactaaagagcttcagcacagcaaaataaactatcaacagagtaaacagacaaattacagagtgggagaaaatattcacaaaccatccatttgacaaaggtcaaatatccagaatctataagaaacttaaatcaacaagtaaaaaacaaataacctcattaaaaagtgggtaaaagacatgaacagacacttctcaaaagaaggcagacaaacagctaacaaacatgctcaacatcactaatcatcagagaattgcatatcaaaaccacaacgagtaccatctcacaccagtcagaatgactgctattaaaaagtcaaaaaacaacagatgctggcgaggctgcaaagaaaagggttgaatgcttatatactgttggtgggaatgtaaattagttcggccactgtggaaagcagttgaaggtttttcaaagaacttaaaacagaaccaccatttgacccagcaacccattactgggtatgtacccaaaggaaaacaaatcattctaccaaaagaaacatgcactcgtgtgttcatcacagtactagtcacaagagcaaagacatggaatcagcctaggtgcccatcaacagtgggttgaatgaaaaaatatgatacatatacactacgaaatactatacaaccacagaaaaaaccctgaaatcatgtcttttgcagcaacatctatgaagctggaggcttttgtactaagcaaattaatacaagaacaaaaaaacaaatattgcatattctcatttataagtgggagctaaacattgggtattcatggacataaagatgacaatagaccctgaggattaatggcagggaatggggagtaaggactgaaaatctaactgttgggtactatgctcactatctgggtgatgggatcattcacatcccaaacctcagcatcacacaatatacccatgtcagaaacctgcacatgaacccccgaatctaaaataaaagttggaaaaaacagctattgatacatgtcctgtgttctagttaaagaaaaaagcatcttcttaggcttcagtttaaaatgtccactacattatatttgttagtttttgttactctgtttaggaatctgaggtcaatgaagttaaaattgtcatgttaataggtgttttagacttaccgcttattaaaagtatgttttaaagctgaatcatacagtgttttatattatattgattttgtttatattgaaatcagcttaatatgatgtgtgtgtgtgtatcaatataatactagtcctacagtgtggttccacaattcatccttcagcccttcctccatatgctgtcaaatactgtttacctacaggatgccgggtaactctgtgtttgtgtgtgtgtgtgtgtgtgtgtgtgtgtgatctcacctatgttaaagttagacttcattctcatccacctctcaattagatacatcctggatactaaaaagtttttgagcagttgaattaactgtcacaaatatcacttaatttcattctcagcttatttgccatgtattcatcttagtctaagcccttctttcaataactgtctgctcttcctatatccatagttccagatgtcaaggttatctagcttctcaacatagattgctaagggttgacttactagagtcagatagacaaaaaaaaaaaaaaaaaagaagaagaagaagaagtaaatttggagaaactgtcactgagagaggatgtagaagaactcaaacaatgacacaagaattggtaaggtgcagtcactgagtgatgtttagggtaaaagctgggtaagaaccctgtatctcatcaatcactgaagcattatagaattagagaatgtagtctttggtgtccataatcaaagtttcagtcttcacaaaatgattcaattatattcattatattctgtgtgagaagacaggtaagtgtgtagaacttactagaaggatttccttcaaaagtggttaagatttttagagttcatacttaaggggatgagatttagtttcaatgaaaattaacttctataaaatatctcatttcccaatatgtcagataaatgagatattatgcacataatcctaacataaaagacattctctgttccccaattatgtaagaaaagggaactattgatttaggtactttgtatctcagttaaaaagcaggtcaaataggtagcatttcaagggtcttatggtttctttaagagattctgtaacacactatttgtacataagatttttttaggatcaactgactgcttcacagagagcctgacatgtaagaattttttggtcattgttattacctgatcatatcttttttccctttaaattttctatgtattataggtaggtggtgttttcactatgtgtctttcacttcttagctttaactcatttgtgtctttgtgtgtcaagtactacatagaattaaatcaaataccttccataggtattcataaagttaccatagatggtcacaccagaaataaagaaaaacagatactggcagccacatctttttgtgtgtttagagctataagtggtacctgagagtaaaataaaagatctttcccaaaaatttggaaataagggaaatggacttatcagaatggtaaactatacaaggttgtcttcttaaaggaaaatgaatcacagcagtggctttttaaaagtattaactcatttaacaaaaaatgctttaatcctaaatgaatgtattgtcctagatctgattggtataagagaaaacatttcagatattcaaaacagagggtattttatacaagtaggttgttctcaaggtgttgtaaagaagggctggaagaacaaaagggaaaggtggcaggtactggatggaagaaaaggatgattgacaggagctggtgcttactgctacacttgccgatttgacatttgaaccattatgggacgctgccccaaccagagctgaaatgccaacaacattccactaccgaagaggcagaaaatgcagaagagatgcttcttctgtctggaatgcttgaggctgcaggtgctttgtcccctgctgacacagcagctgtcaacaaagccctcagctcttggagctagaaactggacgttttctttcttcctgcttctgtcctcctcacagtgcctcccactggcaaaacccaatagaaggccaacaagcaagagagttggaaatgtagtttgtagtttgtaggttcagccgtacagaacaggctatagaagcgtggatgtgtagctggggcggacgtcagatgaatcaccttcttagctactcggcattcacacacacccttgtacttttcaccacctttcattaccaatagcaatcactctatgcttccaatgaacatgatactactatgctttgtacaaatgacggtgctctcacctccctcatcacattcttatctgggtgatgttaattccccttttagttcaggcacaacccatctggatattcttcaacataaaaaaactaaactataaattaatacccactaaccctatttacatgaatcaatggggaaaggaggacggaaaattggctacaatatacaaatctctgtgtcataagcagaaataaaatatgatagcatttataattcttgtttatataattagttgtgagaccatagctgatatttacaacttcttctctttgccctcagctggtagttcatttgtttgtagttcttttatttttattttttgtagagatagggtctctctatgttgcccaggctggtcttgaactttggggctcaagtggtccttctgctttggcctcccaaagtgttgggattacaggtatgagtcaccacacccggcttatttggaattttttacttaggccactggatcttcattactaagggggtctatgtccttcctgttctatcttgattgggttgctgcagattttcaatgcttatatgattggacctggtcatataaagagatgcccttttgaatgtcctgactgacaatgtgcagtaggaagccagtttctcctccaatatgataccttttctctttgcctgttataggaatgctatgaagagagggttaaaaagaagccaatgtgtaccaggtgcttagaacagtgcctgatacattatgagtcatatagaatgcattaacaaataaggtcgatttacttctggggcatatctattaagaatatcttcttttagaaagcaatacaaattataagtatgcttcacttattaatttttgatctggaacacacatgacaacagttaacaggatgcaatagaaagattctcatgctggaactgttgggttctatttctgtctctgtattaattaggtttacagtttgatattcaagggtaacatctattttatcctttggtaagagacagagtttagacaaggagaaataccagagtctgtgatttaatgattccatgaaactagaaatcacatcaagagtgcttgctttcttaagaccttctttgctattgtctagtagtcatactgaaaggcaattattatcttcccaggtgttatcacgagttatggattatatctagatggtatattaatccacaattcctcagaactcagctatcgtgcttacggatttgctccttggagtttacattccttcagagtccaagcatgcacggccaaaggttgtgctctgggcccactggtgagtatctaaatttacattctaggaatgtgttaaatgtcagatgacactgaatattaaggaagaagtaagtggcggtgactcaccctctgcacagctagcctttcaagcaggatgggagatttttctttttataaaagttcatttaagagttactaagattttatattcgacataaatttcaagactgaacataggtccagtgaagggcagagtctacattttattgaaagaaagataagttggctagtgtagtaggcaaacatgaaatttttcctaatttagtgacatattgaaggcagatgtttttctttctaatcatgggctcaacatctaagtaagtttaagattaagaagtaaaaataattgaaagtccataagtgccacaatatggcaacactgctccccaaaaagtaatcaattaaaaggttgagtttacctcatctgttaggataaaatagtttcatgtgatacagcttcataagaatggtatttaaaattacatcaatatcagcttttgatattcatatttcagaaatctatatctgaaatgtatatctatatttcattagcagttaacagcttgacaagattatgttttctattcctaatataatttttcaaacccaattaatagcacttaattatcataaactagcaggacagtcttcagtttcaaaacatcacattacactttggtgcatttttcttgattaattagattttgcttctttagatggaaatgctcattagtcttagatattttttggcaatgtttgctaatgccctatcattttagtgcatgctgtcttcactgaagagtatattatataaatattaccttggaagacagctctatgttttaatttctgcttccttatttttgatcacacctctctttttgtttcagagattggttgctttccaagcagctaacaccatccatcggcggagctgagctgtagtctttattgccattaagcattttatagcccagacccctctgatggatacttacccttaaatgcaggaatggcaataggccagcttttcttatccattcaaaaaaaaaaaaagaaaaagaaacaaaagaacacgtcacatgagattgaaatttacactttttgaaaatgtaagctgcaaatggtagttctggctacaaaattggctcagcggtgtctcctgatgttctggcaactttaaataagggggacctgcattatcaacctgcatcctgcacagacagtagctacgttaaccttaagaaatcaaatgccacaaagctctgataggaaggggggaatagaattgggttgtaaaacctagtctgccatggcttcattcattccagactcaatcctgacttacagcacagagttattttctcccttggtacttttctttatgctgtactcagtatgcaaacgcttttccctagtcaatgatccatctctaatcactgggattgaagagcaatgtctttatttagaacaagtcaactatatgctaccaagaagttaaagcccatggtcttcaactggtttgtgaaatatttttgtgcccattaagtgattccatatctgagtattctaaatagccctggatggctagcacaatcatgaaggatattacagattcagcttctttttgttgatgattcttttaatgtgtccttattgacttaagaaatctatgaatcaatcttaaaaggcagagttttctatcattaaattatgatgtgatactcaacaaaattcagtcaaacgtggcaatggtgtacaacggtttcttaagatattcatctaaatagagcccgatgctatgacattttaaataaaaaatttcattgaaacagaaaatttatcatttctatttttaaatattttgctggcagaaatcagaataaattttgaaagagttcaatttttttgttcatctaatatttcttaatgataattcttgttctttagattatccacacatgcagggaaatactattcaatgttttctatgaggaatatgcttcacagtcccaaatatgatatggttcatcctccaaattgcaaattgttcatataataaaaaatatgaatttgatggagaatttttaaaaataaaaagacatacagaagttccatattcttaccacttgaatgtagtattagctcatttttttttctaatctgaccagtttgttagctattatttatggttcagaaggagttgccctgtacctatctggaaaaaacaaaaacaaaacaaaataaacagcagcaacaacagcaacaaaaaaaacccacaatgattctcctgtggtttttttcagttcttactcaaccaaataatgtatttgactcttatggaaatttcaatatagaaaacaattgacaaagcctttgaacctaatttttagatgctaatgtgcattgtcaagttaaattcaataaattggggttttataaattttgaaataacataaaaattaacagaatgcagcaggaactttttaaatgctttccttgctttcaattgtattagagggaaacccttcacattttgtaatattctttaataaaatacaataatgttttccataagaaaatcactttgctttcttactccccacttagccaatgttacataacactagtggagtctaagattgagaattttatgactgtgtcttgtattgtaacattcattggatcgattctccagggactcttaaggatgatatgcgagactataggtcattgctatgtgatatggctaaaaagttgtcttggttccttagtgatgtcatacttatacagataaatacacctggataaatacacatgtacaaacacattcaccctttcacattttttttttttgcaaagaagcaaataagtgtgttatttaagacatctaaatcttaatggcaatatataatatagtcaagcaaacgctataggggaagtctgccttcaacctgcttaaaccccttaaatccctatacccccttaggagatatacttattctacaaagcctcagatttctcaactattacaaagagaaataatgtctactttaagagagttggtgtaaaaaattaaatataacttacacaaatttctggcgcattgcaagagttttattaagaataacagtttatggccaggcatggtggctcacacctgtaatcccagcatgttgggaggtcaaagtgggtggatcacaaggtcaggagttcgagaccagcctggccaatatgatgaaaccccatctctactaaaaatacaaaagttagctggatgtggtggcgggcgcctgcagtctcagctactccggaggctgaggcaggaaaatagcttgaacctgggaagtggggattccagtgacccgagattgtgccactgcactccagccttggagacagagtgagactccatttaaaaacaaacaaaagaattacaatgtattaaagtgtttgtatgttttattgcacatttgctctcaaatattttttctgtgtcaagagaggttcccaggccaaagccaagccaacttttacctttcccaagtgccttttccacatattccttttacagcaaggtagataaacaaaaaagtaaaatgaaaaagaaagaccaggtcagagcaaaatagtacaattgccaaattcaatgtatagtaaaaactgaagtgtttatccaaatatttaaggaaatgttacaaaacatatttattttgaattaaccaaatatttgaggattataatataattatctggaattgcccttaattcttcaacttttcaagtctcattttatttggaatgctttaaaatcattctatgtacaataatatgaactatatagataggcataataaaacaaattacattgtcataaaatattaaaatgatgaattgatatttttctggcctagtttcatcatttttgtatgtagctattaaactaaaaacgaaagagcaagtgttatagttctaaagaatcccatagcttttctctgatgaaaataaaacatgttgtgacctcatagttattaaaaattaacactttctttttcacatttattttcataattgataaggtataatcaccctaacaaataaaggttttctaattgataatatttctgcctaaggatttcatgtttgatcacctccttgggaggcaagagcttgtaccttaagaataaagttgaaattatcacatatttagtaaattgtgaaaggtcaaatatctatgagtgatgctgatgagtttgtagtgattagttaactgaatttaagctaatgattaaaagatattaaaaatttctgaactcttttctactttcttgccaactacatcttcctctgaccacttattttacttatttatctattgaaatcttcctgaccccggtacagctagggattgcattttatttcagagtctttctcttcaaataattcatcttttgctcttttctgcatagcttcattaacacaatcaatatttttttgtgattgtgccttagggatagagtccctaggatgcatgtatttcttaatgttagcatgatgccatttttacataactgatagcaacatagctcataaaaattttgcgtgtgtgtgcgtgcatgcctgtacacacatgtatgcatgcgtgtgtgtgtgtgtgtgtgtgtgtgtgtgtgtgtgtgtgacagagaagagagagagtcaagatatgtggtgtagctttttgacagaggccagaagtctaccacctaagtcaaggacttataaaaacagactgcgtgcatttcttctcttttgcaatcacataaaaattattttaaagcagtcctagaattggtctatggatatgtacagccataggcacagtcacagtgtgagcagatccacatattctggaaatcacaaatagctgccttggtcaagagctcaaattctaagctttaacagcagggggaagaaaacatgaggtgtgctttgatcctgctgacaaaatgaggtattcatacaagatgctactgtcaaaatagtttacttcacagcaaaaagagattctttgaagaaatatgctcaaagcgaagcatgtacttattttatttgcaaacaaaaataaatctttttatactcacaggtggaaaatcgaactctagaagctcctcctgaaggaacagtaaatgtgtttgtcaaaacacagggatcccggaaagcccacgtgaggtgggaagcaccttttcgccctaatggactcttaacacactcagtccttttcactgggatattctatgtagacccaggtaatttgtttttattttctaaactttaaataacattagaaaacaactcatttttatttaaaatctttcttttggctaaaatctttcttttagccacagatgttggtttctttattttcctgaaaataacctatacggataagctactgcccgacggttctcagaatgtggttcccagagcagcagcaacagccacatctgatgaacgcttagaaatgtacgttgtagagcttctgccccagcctagtgaatcagaaactctagaggctaaggtctaacagtctgtgtttaagcaaaccctttaggtgacacatgctgaagaactagtatatactcttcttcccttgctaaaaagtggttcaaacctaaaacatcgtgtatgcaaagagttgaactataattttgcagtccatcttaaacaagccatttttgtgactgttttagatttctgaactatcttagtaattctgctgtgtgttctgataaatttactgaatgtggattaggctacatggggttccttgaaagtattttcaaaaactatctgattcaataagttaggtgctatggtagcatgatgtttattttaagcaaactctaccataaaaagagcaggtatatattttaatagaaactttggatctgtattaagtgctgttgtttatcatcttccaggagtggccttactatttttgtaggaggaagtttgaacctttatttttaaatgagtagcaaatatgcaatatcgtggattcagtcagacatgttattagcatgttagtctgttgcttaggcttgaaaacgtttctttgtttctgaattttctatgagtctttgtaatacttaataacatcctccaagtgtaaaaacaggtgaagaaagaaaaaaacaggcttttctaaatttgaaaagggtggttatttgtgtactgcactggcaagcaaatgcgagtcaagtgcgtgtcagagtctaagctgatcccctcaaagattggtgtgtcccttttttatgcaatcagggctttcatgtattctgctgtaaagcacttgtaagattatgaggtgaaggagtgatgatcgatttgaaaaaagaagcaacatttaggccggacccatgacagcccagctatttccgccaaggcagctgggtgaataatgcaagagccatattccccctcgtgtttaatcttgcattgtttttgcagagaaaatttctgcttgccttctaagtcatgtcatcttcagttgtcatcccgtctctcaaaccatcaaaacggtattaaatgttgcaaagctgcgcggcaagagaactttcaaaagtcagaacccatttaccgaacagcccttgtagaaaatgtattctgttctcggcagaattttccttcagttctttccactgagaagtttactgatttctcccagtggaatctgctggaatttatcggttcatggttggcagtcacagattaaggtaaatgtcgatccgtaatgaccctctacatgttagtattgcagtaaagctgggcttttatgtcaaagatatcggagagggagctattacacatgacaggggtgatcaagggactccagaccaaggcaagcattattaaatattgactagttctgtgatttatgtagagctggaggaaaaaagtgactttttaaccattatatattcttcagcaacgaaaaccagccatttatctcctgctggtaataaagaacagagtgcctgcatattttagtggagggaaaacctggtcttataaatgagatgaactccttcgtgataacatttcagtttgttaattgccaaaagcaaaacagacaaattggaagcaattacgagatttgacttaaagaatttttgcggtacgggttcaactcaggggttggaaaggggtgaggttggaagcaaaaggagcatctgagatgggccccaggaaaattcgtgtcattggttcactggcactggaactctcatgtccactgttaactgaaaggattttgaatattgtcttgtcctgtcacccatcagcagctgggtgacatttacactgagggtagggaggtctgcatggctctacaagaacaaattaaacattaattcatcaaacttatttaagatatcatctgttcactagatttatacaaagcttattgaattgtctaatggctaattggttatttccttgacataatgaacaactgtatttcatcctttcctgtgatggctgctaaagagggggtggttagaatttataagatagggaaattcagctagttcaaagcaagtgtagtttcaacataaaagtgcctgcagctgggtcactattttgcaggagaaattgggctgtgtctgtaagacaccctcatgggaaccctattcttcatgtcaactcgtatcctgaactaaaaactttacaaaaacattaggtttcgtaacaacaagtgaagtggcacgtatcaaagtgtgatttttcttaaaaattgttcacttttgaccacgtattatgttctcatgaatcaaaatttaaaagatagaaaaaaaggaagtaaagtaccaagcctgttctgcagtctcagaggaaaagtagtgtgctcagcttcttatatccttctagaaatatttgtcttataggtgtgtgtgtgtgtgtgtatacataaacaaacacatatttcccccatttgtaaatacatatagttttcatctcacacatgcaacattttatactaatgataccaagtggtacacattattttgcaccatgctttttttccatcttaataatttcagagaaattatcacagcaattcctaacgagcttcctcattctttatatagcttggtaatattcaacgggttagagcataccatcattggtttaaccagttccttattaatggccatttaatttgtttctaatcttttattatttcaaataatgcctcaatgaataaacatatgggaatgtcctttcacactttgcaagtaaattaatacgataaattccttgaaatgaattgccaggtcaaggaaaaatgaatttgtaactttgtaagatactgtcaaatttcattccatagagaccatataatttatattctcagaaaaagtatgagggtgcctgtctccccacagtcttgtcatcagagtgttgtcagacttatctttgccaattcgatatgttaaaaatggtagctatttcacagtatcttgagtagttattaggaattagttggaacttatgaacatattttcttaagtttaaaaactgtgtttcttttttttgtgaatgcttcatttgtatcttttgcccacatttttacagaggtttaagaagttctttatatattaggaaaatctgttatattagtagaaatttttcccttcattattgctttttcctagcactctactgctttcttttataaaatatttatattcagttcatctgaaatttatactgatataatatgtcatgtatgggtcaaaccttattttcttcccagaaaattttcctttctctcaaaaccatttactgaataatccttattgttccccactggcttgggttgtcatctccaagagctcctaaatttccatctttattaataaatacgtgtggacatatctgtacctttatttacattatcaaggtatcttaatgattaaaactgtagaatatattttattgccttgtagatctagtcctcttcattatttttattttatataatttcctacttattatttcatatttatttttttcaaacaatatttatatatttctaattttaccccagaagtcctgatgctgtttttataaggatggaacagaatttacaggtgacttaggtagaattaatatctttatactgtcgggtttttctgatcaatgatatcattatactttctattttgtgtcttttgtgtctctcgcaagagctcaaagttttcttcatatagatcttgcatatttctgttgtgtattcattaatattttataattatacatgatttaagtaattatgataatatatacattttacatattaacattaaaattaaataactgaaaagagctactttcaataattatatgtagacttcactcgcagatacctgtcttctgaaagccacgattttaaatgtttatatctattagatgatcgttcatctaacttttacaaatatttgaagtttttttgctgctaagattattgtcattttctctaaaatgcaggcatcttaccaggggaaaatgataatctaattaattagactctcaactagtttgtggtgtgtaaaatggcaacaaaggttggacctgaagaatctctgtcctgacagaatttacaaataaaaaagctaaggcagacaaacttagccaagttattctcaagtgcatgaggcaggaaagaaactagatggtgtgacaagtggaacagaaataattaagggaagattttggtaatactgggtctttctctttaattatggatgagaataaactgaatatggaaaaactaaagagaatgacggagagagcacaaacacatgtgaatggcaaaaattaacagatcaaccaacctacacttggttatattagaatgtatttttgccatttgctaacatccaccataaaagtaaggattagcacttttctatgggattctacctgatttgaaacatctattcaattatgaggaacatatgatcaacaaattagtttttctagggtgtgcaagtgccatttactgacctggaataagtgctttgctcaatgactctcaagggtgcaccattcaccttgcacaggtgaatagtcaactcccagtgatcactttacaacatcttcagtattttttcacacatatgaattaactatcaatttaaattatagataacaggtttataatcattccttgtgaaacatattgaatatataatttttaaaaaataaaacaaatgtgtaagtttgggaatacaaataaaactttacagcatagtagtagcaacctggcttatgtaaaactatttataaaattataaattctattccatttaactggtagatgaaagtattgtgccatgataatttagggttacatcattattttacagagcttcaaaagtattctcagctacaaatataaaacaacctaattgtcaagaagaaaaataaaaactatgaaaagataaagaaaatattctgagatcctatagaataatttttacaaatggcagcttctttactactagacttcccttggattcttcacactgatcctgtacttagtagacaatgccatgtcttagtacacatatcctgcttttttcttaagtggttattgtggagtcctctgcgaattgtttaattcttcattatccttccttttgaatgaattgggacgtgatcttcattgcttgatatcctgacagattgctttgtgtcagagtttctaaggcaaggcaccagcgtgtgctaattgctgagtcctttgtgcactgttaactctcacctgctctgaaaaactggattgcagcttagttttcatcttcaaatgtctctttctcctaatcccctattttgtgctgtgccacagaataaagatatttatttgaaaaagagagatatggattactgtgggggaaaaaagagggtaaatgaaaatgatccttaagcattagcaaagggaaatggcattttagaaaaacaaaagaaaagcaaagcagaatgatcagtttttaatgttgaaactgaatcatttcatggatctcagataactctttctgaatgtggagaggtacaacaaacaggttttaggtgacttttcccagagtaaatatgtctaatccaaaataagtcctcaaaagtaagggtggaaggtaaggaccgggaaagaaaggaaatggaagatagaaagaacaatttttaaattgttaaatgctcatgaaatgagcataatcagatgctttttatttgcttataagacctgatggtcctgaaaaaaagaaacccaattagtatttaagaatgtttttaaaaaggcaaatgaaaatttgggaaatatatctgttatctctaggtggttatattatgaatggtttgtcttcccatttttccttttatatgtactcaacttaaaaaaaattctataatatatacatattatttttgcaaaacattataaaaaatagctcacaagagcagatgattcaagagcagagtaatttggagtaagcatggtgcttctggctccaaggaggagatccgggtggtgagtcagaagtcctaaggtggaagcttacagaaagaagggcatcttcacatatttccaatgattattcaggaaaagtcttttggtgacttgtgggatgttaaatttaactttcttcttatgttttggctgcatatgtttttccaacagttgctaggggtaatcaaacaaaaacaccaaggattctgcaaaacagaaaagaaaactaaataggagtggtcagagaaataaaagagcctctttatacctgagacataatggtagtgttaggggaggactgaggcatgggagatttggtttttttgaggttacattgtggggatcaggaggggcataaagtttttactgcagtggtaacatctggaaggagtggggtgccttaaagaccgattaggatatttccaggtagaaaagatagagtataaatgtgatggctccccatcccccattctctgagcctaaactttttcttctgttataattggagtccatatctcatttcaatattggtatcaagtgtttgctctttgggataaatccccatctaaaaacaaaagaaattaaaggggaacggaaactgcagaaatgcagaaagtatttcattgctggtttaaactagatgaaagtgtatttttaactacagttccgaaaaatcctagcacccagaataggcttaccttctcctggaattgccagttaccagaaagagtgctttagaatgtcagtatattcaaatgctctaaatctctaaaaaatcttgaaaaaccaaagaaatgcagttgatttttcaaggttacccagagaaatccagtgtccttttcacacactctggttctctgggtgcttttctccccagaatatactgtgttttataaaaattacaagatggaaaaaaaatatacagaagcgtttattttcttgagaaggtaaggaaaataattatatgtgggaacctcttagacttccaaagagtctgtaggaaggctaatgctgttaggaaagggacagctttgttttatagtccctggtatctgttttttagtgtggagggaaatctgcggtttcagagctgtgcttgcaacccatgcagtatatctgacacgctgccctctgggaaaacccgccagtgggggaattgttccagtgatgcagtacagcttgtaacttggaatcccgtcggagaactttgtagttgcttgtcagtcagtgggaagataaaagaggcagcttcttttcaagcaatctgaattcattttcccgtaatgagttagggggtcaggcagcaggagtgagttcacctgagatcttataaagtatatttcctggtggaagaaagagaggaggagaaaagggaacataacgtccaccacgcagctgtagaacggcgtaatgtggcttgtcgttggtctatttctttttatgcccacatattctgatttcagagcatatatttttagaaagaaaggtcaaagaaagtacagctttatctcatttaaaaatataaaacccaatctgtgaaaattgaaacccagttaaagtctaaagcagcaagtgatagtgtttcatacacaaatactcatcaagcaacaacatgttaaagatattgtactatgtcttctgacattacatcattattaaccacacaatttattttagagacttagaagaaattaaatgagtgtcatgataaggagttcttttagttacagacaacagccccagacctctcttcctgaccatttcagatgttgtttctaaatcagcacaaaagatattaggaataaaaactgtgggagaatgttcttatggtcaaagcaagtattaatataaaaaacattgggaatgtaggggaaatagagaaaattactctgtttctatttgtttggaagcaaatgtctcttatgcaaaaaagaaagtatagttattatatctttctgtaagtttccaacacatttctggatgtataaatacatacaaatctaaacacttgggaaatcaaaaggcattttttctggactacaaattatggccatattgttaatgaaaatataaacgggcaataataagatatctgtcatttcaaatattgggctatagaatgtatatgcactgaatgtattgacacttctgattgtatatcatgtcatggccaataaagctatagaaatgtttaattaggacatattcttccacaagaatggagttaagcattaatttatcaaacttgtttaagacctcatctgttctcaacactcacacagcagcttattgaatttgtctgatatctaattggctattttcttgacataatgaacaagtgcatactctatgctgttgtgtctgttgaggcggcgatgtaatgatgaaatggaaattgtaaccatgggtcgtacactgattcaggatatgcagcccacagagccatgagagggcacaggatttcattgtcctcatggcttaactttatgtttcaaactctgcagagcatctctgtggaggaatctctccattctaactcctcatgaaaggagcctgttagaagcaaaatacaatcagcagatcacccagatgatgtacctttggctttggaaggctttgcataatttaaaaaataaaataaaattctcctatttagagaaatttttaaagcatttaaaaatactcacaccattttcaaacccacaccacaagtgatttgggggatttctaatacatgcatgataaagttcaactggataagccagccgtggggcagatatataatgtttacctatagttgtgtaccactgatatgcctgtctagtgttggtttttgcatgctttgttgtggcaagagttcagtgcttgttgaataaatagtaatattagaatcagtgtttagattttggtagactgaacatatagccattttacctaggaggttctcagtaggaaagtgtcagctgtgaattgatgttagagggaaacagaagaatggattacacagagaaatagaaaaaaaatctagccatctggggccaatgtccttctctagcctctaagacacaccctacagcaaggaattcccttctctgattcctgaacttctcctgtgggaatctagggatcaacttccttggatggtgatgggtccttatcattatacagagttatgaggattacaaaccatatgtttggccccttagaaagtgataataggtgactcctaaatcatagttctatataccaagaacagcccacatcaaacatatttcccaaatttttgtgtgaaattcttcataatcaatgtgttactttactcaattattagtgttgcagaatctaaggattctagtgggctatttatgaaaaaaaaagtatatggcttttagagaatttggattctttatttataaatcgggttgcaaataaaatttatgtttttccttctagcaatatgcctttggggagaagcaaagggagttttacacccaagaagcagaaatcaaaaatcatagaattaaattaagaaatttatttgtttatttggacattcattcatttgttcatgtagaaagcatgtatctagcttgttttatggaacaagacagaaactaaatgatagctgctggagttgagtagagaaattttctctatccagagttgaatcatatgttgttttattgtgctaaatttgttagacatttaaatttatacgaatgatggtgcctgtttctgggatatttattccttcccattgtaaacctatttctccaaatcatcactatgctaacttaatcactatgctttcaacatctgaaacatttagaaagtacttaaatatctggcaagcatggtctgtgtgctgaaggggcttgtggtttaacaaggggagctagaaattacccaagtaatcatatagaaatataaaattacagactttaataattattaaagtaaaagtatatataactaagattttcataataagaagcttaatataaattggagggtcaagaaagtttctttgagctgatgacatttagggtaactgtaacatgactagacaccaactcagaaactagaaagaggattccaaagtgaatggcatttgtaaaggatgtgaggaaggtaaaattgtggtggatttgaggaaatgaaagaaggacattgtagctaggctagggagtgaagaaaagaatggcacagatgagactagaaagttagacaggagctacttcatgcagcagactgttttaaggactttggcataaagtaaaagtgtagttgcaataattacaaaaaattttcaaattttcaattgtttttttttattattattatacttcaagttttagggtacatgtgcacaatgtgcaggttagttacatatgtatacatgtgccatgttggtgtgctgcacccattagctcgtcatttaacactgggtatatctcctaatgctatccctcccccctccccccaccccacaacaggccccagtgtgtgatgttccccttcctgtgtccatgtgttctcattgttcaattcccacctatgagtgagaacatacggtgtttggttttttgtccttgcgatagtttgctgagaatgatggtttccagcttcatctatgtccctacaaagtacatgaactcatcattttttatggctgcatagtattccatggtgtatttgtgccacactttcttaatccagtctatcattgttggacatttgggttggttccaagtctttgctattgtgaatagtgccacaataaacatacgtgtgcatgtgtctttatagcagcatgatttataatcccttgggtatatacccagtaatgggatggctgggtcaaatggtatttctagttctagatccctgaggaatcgccacactgatttccacaatggttgaactagtttacagtcccaccaacagtgtaaaagtgttcctatttctccacatcctctccagcacctgttgtttcctgactttttaatgattgccatcctaactggtgtcagatggtatctcattgtggttttgatttgcatttctctcatggccagtgatgatgagcattttttcatgtgtcctttggctgcataaatgtcttcttttgagaagtgtctgttcatatcctttgcccactttttgatggggttgtttgtttttttcttgtaaatttgttggagttcattgtagattctggatattagccctttgtcagatgagtagattgcaaaaaatttctcccattctgtaggttgcctgttcactctgatggtagtttcttttgctgtgcagaagctctttagtttaattagatcccatttgtcaattatggcttttgttgccattgcttttggtgttttagacatgaagtccttgcccatgcctatgtcctgaatggtattgcctaggttttcttctagggtttttatggttttaggtctaacatttaagtctttaatccatcttgaattgatttttgtataaggtgtaaggaagggatccagtttcagcttctacatatggctagccagttttcccagcaccatttattaaatagggaatcctttccccatttcttgtttttgtcaggtttgccaaagatcagatagttgtagatatgcagcattatttctgagggctctgttccattctattggtctatgtctgttttggtaccagtaccatgctgttttggttactgtagccttgtagtctagtttgaagtcaggtagcgtgatgcctccagctttgttcttttggcttaggattgacttggcaatgcgggctctttttttggttccatatgaactttaaagtagttttttccaattctgtgaagaaagtcgttggtagcttgatggggatggcattgaatctataaattaccttgggcagtatggccattttcacaatattgattcttcctacccatgagcatgcaatgttcttccatttgtttgtatcctcttttatttcattgagcagtggtttgtagttctccttgaagaggtccttcacgtcccttgtaagttggattcctaggtattttattctctttgaagcaattgtgaatgggatttcactcatgatttggctctctgtttgtctgttattggtgtataagaatgcttgtgatttttgcaaagatactcctcgagaagagcaactccaagacacataattgtcagattcaccaaagttgaaatgaaggaaaaaatgttaagggcagccatagagaaaggtcgggttacccacaaagggaagcccatcagactaacagctgatctgtcggcagaaactctgcaagccagaacagagtgggggccaatattcaacattcttaaagaaaagaatttttaacccagaatttcatatccagccaaactaagcttcataagtgaaggagaaaaaaaatactttacagacaagcaaatgctgagagattttgtcaccaccacacctgccctaaaagagctcctgaaggaagcattcaacatggaaaggaacaaccagtaccagccactgcaaaaccatgccaaattgtaaagaccatcgaggctaggaagaaactgcatcaactaacgagcaaaataaccagctaacatcataatgacaggatcacattcacacatagcaatattaagcttaaatgtaaatgggctaaatgctccagttaaaagacacagactggcaaattggataaagattcagacccatcagtgtcctgtattcaggaaacccatctcacgtgcagagacacacataggctcaaaataaagggatggaggaagatctaccaagcaaatggaaaactaaaaaagtcaggggttgcaatcctagtctctgataaaacagactttaaaccaggccgggcgcggtggctcacgcctgtaatcccagcactttgggaggccgaggcgggtggatcatgaggtcaggagatcgagaccatcctggctaacaaggtgaaaccccgtctctactaaaaagacaaaaaattagccgggcgcggtggcgggcgcctgtagtcccagctactcgggaggctgaggcaggagaatggcgtgaacccgggaagcggagcttgcagtgagccgagattgcgccactgcagtccgcagtccagcctgggcgacagagcaagactccgtctcaaaaaataaaaaaaataaaaaataaaaaaaataaaccaacaaagatcaaaagagacaaagaaggccattacagaatggtaaatggatcaattcaacaagaagagctaactatcctacatatatatgcacccaatacaggagcacccagattaataaagcaagtccttagagacctacaaagagacttagactcccacacaataataatgggagactttaacaccccactgtcaacattagacagatcaacgagacagaaagttaacaaggatatccaggaattgaactcagctctgcaccaagcagacctaatagacatctacagaactctccactccaaatcaacagaatatacatcctcttcagcaccacaccacacctattccaaaattgaccacatagttggaagtaaagtactcctcagcaaatgtaaaagaatagaaattataacaaactgtctctcagaccacagtgcaatcaaactagaactcaggattaagaaactcactcaaaaccgctcaactacatggaaactgagcaacctgctcctgaatgactgctgggtacataacgaaatgaaggcagaaataaaaatgttctttgaaaccaatgagaacaaagacacaacataccagaatctctgggacacattcaaagcagtgtgtaaagggaaatttatagcactaaatgcccacaagagaaagcaggaaagatctaaaattgacaccctaacatcacaattaaaagaactagagaagcaagagcaaacacattcaaaagctagcagaaggcaagaaataactaagatcagagtagaaccggaagacatagagacacaaaaaacccttcaaaaaaatcaatgaatccaggagctggtgtcttgaaaagatcaacaaaattgatagatcactagcaagactaataaagaagaaaagagagaagaatcaaatagacgcaataaattttcaattgttacacagttgaatattagttacatttagtagctaaaggcttagattggagtgtcttttttcttcagagacagttttgttaaaatggtaccagttagaccaggtgcaggggctcatgcctgtacccagcagtttgggaggctgaggcgggtggatcacaaggtcaggagttcaagaccagcctgtccaagatggtgaaaccccatttctactaaaaatacaaaaaaaaatattagccggacatggtggtaggagcctgtaatcccagctactcgagaggctgaggcagagaattgattgaacccaggatttggagattgtagtgagccaagatcacgccattgcaccccagcctgggtgacagagcgagactctgtctcagaaaaaaaaaaaaaaaaaaggtagcaattataaatgtgttattggcttgcagtcattttttctatggagatatacatatgtgtattcatgtgtttgcatatataatgtattgagatcttactacaaacacatatcatattttacacatttaacattatatcatgaatgtttcttgtattacacacaaaaaactcataacaagtatttaatattcaataggtacttaatatactatagtatagatgtgccaacatgtatttatcaattccttattgttggatatttaggttttttattcttactatttgaaagaatatttattgttaacacatacttctacatttttccttaatatgtataacaacaaaggaattgctaaattaaaggttgagtatatttttgaagacacttgatatgcatggcaaaatgctttcaaaaaaattacatcatttcacatggcttctaatagtatacaaatgtgttcatctgtctgtagttatatgcatttgatagataaaaatggtaggttgctctaatttgcatttcttttattcctattgagaccaaacattttccatatgttcttttcctatttgtttgtctttctttttttgtctgctcacacactttgcccagaatattttagaggttttaaaatttgttttggtatttatggaagctaaaataatatagatagtaattcttagtcattacaattttaaatattttatctgatttatctttttggtctttttatgaggtttatgatgtagtacttcagatttttgataattaaatctttgctaatttatttttataaaaaatattttctccgtctacagttgaaacatatgttgctttattttgctaaatttatcagacttaaatttgtatacatgatgctgcctgtttctgagctatttatttcttctccttttacctgtttctaatctgattgaattgtggtgctttcaacatcttaattatttagaaaatacatttgtatcttatgggtaaagtcattattttctcccttcaggttattattcatttctgttaaaaggtcttagttcttttcatatgcatattcttccagttgaacattagattgagttgaaaaaatgacagcaatatttttaatggagtctccttcttatacattaattcttctgaaacttacatcttaaaatatttctcatctagaaatgtgttatttttccatttacttaagcagcttgtatctccattaaagttttgttattttccccataaggacctcacattttttgttagggttattccaggtatttttacttttgtgatggtgttcatttatttttattataatatttaaaaaatctctggtattacgtcagtgtttttaaaacatgccatttttattcaatactttaaaaatatttataaatctctgagttggcaatttctccagctctaggaagacagaaaatacacagatctgtacactcaaagaacgtgagtccagcccactcagtcatatgaacttagctggatataacacgttaacagacaggatagacatttttaccttgaacagaaagagctgtaattcaagttctgtgtcacagatacaatccgtacattatggtttctttaaataagccataaccaattttttttagtaattatttgcttccagttattcatgtgagattattaaaataagcttatgaagtaaatataagatgtttcaaatattcctatccattgagaaccccagaaattatccttattgaaatttttagaaaaaaattagataggtgcacaggaaaatccttataaaattatgtccctgacagagtttatatgtataataaaaatcaagagggtgggtgtttctaaatattcaactatatggattgaaggcattgtggtaaatccattacaaagattatactgtatatttgttgatgagaaaatatatattcttacagctataaaacaatgagcatcataaaattctatgattgcaatatatgacagtagatcatatatgtatagatgtatgtccatatatacgtgtgtgtgtgtgtgtgtgtgtatatatatatatatatatctgaacaaatatgaaggacacacaccaaaatataccaaaatattaataacaatgattatcttcacattttaggtaatttcagcttttctctttatggttgctgatatagccttaacatttataataaaaaaaaattcttttgtagttagacaaagaagaaatatgtgaagccaaaataggaaaacatgggggaaggaaggactttatatcatgtttcatctcatagcaaaactattggaagcatttcagaaacaaaagaccttaaaacttcaaactctaataagaaattgggaacaaaaatcttgagattgttatacaagagatgttaaagaccttaggcctcagtttctttcagaagcccagcaattgcaattattatttattatcactttacttttgcttgaatctctttagctaaaggtggtttacttccacttttccctaataatttatgtcttcatgataatagattttcttattatctttctgatttgtacctgtttcctatttaatgatttactctgtatggcatacatgccaaagttatcatgctagaaaaattattatgctataataattatgataccatcaaactgaattaaattatgtttcattgtaaatagtaaaatgtattaatttttttaaaagcttttttatgccagcggagataaataaagttacctttatgtactttcattaaacacaatgacagtacaagccaaactgataacaaatcaacgcactccttcttgtaacactcctaagttgttctgaaatcagctttcttaggactatgaattcaatgcaatgtattaaacagaatctgtgccttctgtgaataaaagtttcacctccatctcttgtgagtatatgtaggcagatctttgaacaatgaggttttcttccattgatttaaaatgaaaatgaacctggattttaaatgtgcattctaattgtccctttagcacatcagaacagcactgcctaatagaaatataatgtgagctacatatataattttgaattttctaaaatgcacattttaaaaaagtaaaatgaaacagttaaaactaatttagtagggcttggtgcggtggcttacacctgtgatcccagcattttgggaggctgagggtggcagaccacctgaagtcaggagtttgagaccagtctgggtgacatggcgaaaccctgtctctactaaaaatacaaaaattagccaggagtggtggtgcatgcctgtagtctctcagctactcaggaggctggggtgggagaatcacttgaacgtgagaggcggagtttgcagtgagccaagatcacaccactgcactccagtctgggcgacagagtgacttagtctcagttaaaaaaaaaaaaaaagtaatataccttatttaatacaatctatctaaaatatcattattttaacatgtaattaaaacctaaaagttaatgagataatacattattttttctaccaaatctatgtctgtattttacacttataggatatttcaatttagattttttatcagatatattcagtctgcatttagatgtcataagttttcagttgagaaagtagatccacataccaaattgtttcaaatgtatttaaaagttttccagtaactgaatcaatgatcaatttttaatttaaattcattaaaatcaaattagaaattcagctcctcagccatactacccacatttcaagtgctcaatagccatatgtggataggggctattgtattggacagcaaaggtttagaacacatgtataagatgttaacacagaggaaaagttaaaagttaaatcaatgccaaactattgggaatgttttgtctaccgggtttcaagaaataatgacatgactgatatttttcttattgaatcagctgctcggctggttggctcaactaatagagtcaaacagttgctgggttttataaacaaatcatctccttttttatttggtcctccaattttcttaaggcaaatatttgtgccaaattatgccaaagtctgtctctcctgaatatccctgttatcctcgaatattgttgagtgtcccatgaatataactgttaaatgctgttttgagttaaaaccaagaacacctatattgagaaaaaaattaaatgtagttaatgttgtaccaccatgttttgttctagcttctcaactgtctcatgtaaataagcacaataaacatctactgagtgattctgtaatagtttggatctataggtccatcatttgtgatgacacatagaagttggcccaggaaagctaaaagtatgtcatatgtcaaataatgccttccaccaagtttagagcagcatttcttccccagcattacaacttcatgtaatggcacttggcagtattggcatttctgatatgacttcttttggctagttcagaattcttaaaaaataaatagtttttcaccctgtgattgaaagggttaaatagtaccaattcattacactcacaaaaggatttattttgttctcataaatcagttttattccacatttttattattcccttgggtgagctactccaattgaaatcaatacaagtgcaagtgagacaatcaatctcgatatttgattatggattggagattcccaggtccgctttttagccagtttctttctgatcatctcccccaaagaactgaatatttttattgacatctatgagttctgaacatgtttagaaagaagataataatcttcatttgtatactgacaatggaagccccacaaatgaacaaggattaaaaaataaagacttaaaatatgtagctataacatcatcagcaaacttcaaatttctcaatatttttcttaagatgtagtcatgttttaaaataactttattctttcttttaaaaaaagacctgttaatacaactggtggctacaaaccacattcttagggtgctattaggtaaatgattatttttcatgacaaagatattatttattttcacatgcttgtttcagagctgaaccatatcaactggtctaggttaacaataagaaaacagttaaggtgaataaaatgcctttgaaggtatccagcctaggtcttttcatttctataattgtccaggctggaaagccaccatctgggggatttaaaagagaaaaacagctcaactttaaattagagagcaaaattgattaagttgttcctcaatgaggccaacatttatatatcaaactctctttgctttacaaacaaatttatatcttatgatcctttacatatcgaatgcttattttgggactcatggtaccatattattgttctcttgcctctgactctagccacctgttctaggttcttaagcaaaatttttgaaaaggcacaattaaacctttccgtaattcattatttgatacttagaataaggcaattatttgatgcacttatctaatcatattcttaaaataaatttcaaggtaatattaacactgcatttgttactttcagcaaacattttagccttatttagccatttactaattttcactagaatccattggaaggggatgtttcatgttttggacaaattacctaccactgattttttttcaggaagacatataactttgaatgttgtaaaaaagtattttagaaggagttaaaatagtaaacccatatttctttcatttaagcaacattaattactcttcagttactcttattaagcctttagaatagcagctgtataagccatataagccaggcacttggatttccactggcaaacttcctaggcatgtggaattaggggactgtctagaacttatttttgtccagcttcatttccttttcagtaatttgcatttattaatgctgaataatgaaagataatcaaaacattaatgaaggtatggtgcagtgatgtaacaaagggctatatcaacaaaatattctttccacgtgctttgttccactctttaaaaaaaatatttactcaagagaatcattctagaaactggaaattgctccctttattcaggaaggcagtatattttttaaaagttagcttctttaattgtttaattcagaggttggcaaatcttttctataaagggatagaaagtaaacactttagactttgcaggcaatatagtctctgccataattactcaattctgcagttatatcatgaaaattcctagaaagataattacttttgttctaataagcctttatttacaaaaataggcagctggccaaatttggcttgtagattgtagtttgtgggaccctgttttattataactcgtttatacattaaaatgcaatttacatactttccttggatatttcaatcttctcatgattcatttgattttgcaaaaattatgaatgctaatttaaaaatctatgtaatacagaaaaacaacatccactaaaatcccactacccataaataaccaatgttaacaaacagtaaacattattttagagctgtctcaattcatgggtgattcttggtagcaaacaacagaaacaaatttggttaattcaggcagagatgaattatattaaaggaattcaacagttcaaaaagttgtcaggaaagctggagagtcagacttgtggagaaccacaaataacatagcccagaccagcttatgccttcttaggacacccccactggcaccatcaccattcagtcgccttggaaaattatcactctacttctggattctcaacaattttagaggcatcttgaataatccttagttgactgtgagccattgtttcactggatcaagctttgtagtccccagatgaaagcaatgcaactgactggcagtcccatggtcttaccacatgaacttcaggtgtcctttcatttacaaaaaaagagaaaattaagttatgtttctaatcatttctttctacatacctattatcttctccctgattgttagagtttcttgatctttttacttatgcattaattatgattctctcaaggcttttcatcataccattgatttagattttagctctattctgttcctggctttttctaacttgtttattaaatacttactgcattttttaatttccagattgtttctctgtctctgcaatatcattttatcatattatagggaatatatatcattttttcccaaactacatggttattttgtctttttatgttacaatcctttctttagctgtatgtataatactcgatatattatttttttcttcaacttcatcttgcttatgccttgtatgggcagctctgtccagattttgcactggttctgagcttggtctacttcctttcctttctggtgctagtcagtcttctttcgacctaaattttgagcactaggtgttgctagagggtgcgaagatgcactgggcagaattctggggaatccagattttctgtctcctctgagatcctattatatagcttttgtggcagcacttgctgcatttattcacatgtatctcccacacctgggaacaccagctttttcccccaactcagcacagtgcttggcaggatggccagccctgatttctcttcctgtctctgcagactctactcagttcatttctctacatattggagaggattttttttggcttatactccttcctctgggaacaaagttaggagctgcgctatactaagaaggaatttaccatctctttcttcttttaggtttcaaaattcatgtcggtcatttttttccttttcctttatacatttgtacctggagaatcttcaactaaaattgttaatgttactgttttcatagtttgtttccattctgtcaggtattttggaaagacagttgtgtggtaccacttaatttagaagctgtgaaagttcacaatttgtccaaaatctctttctagcaaggtgattcatatatacagttcagagactaacagggagactgtaaggtggcatctgactttccccacctcctggtgttcatgtccttgtttactctccttcccttgggtgtcttcaaaacctgtgacttgctgctcaccagtagaacagaacaaaggtgatagcatgccacctccataagattgtaacctgtcttgctagaagactccctctttttgatacagcaagtggtcacactggggaggcccatatgggaagaaatgagggtgaacgccaggcaacacaaaactggtaactgagagcagccttgagtcaatagccagaaaaaattgagaccctcagtctcgacagcctacaacaaattgaaaactatcaacaaccacctgagcttgcgagagatccttcctcattggaaccttcagatgggatttcagtcctggccaacaccttgactgcagtcttttgagaccctgagcacaggacccagttagctgtgccagactcctgactcacagaaactatgagattctaaatgtatgttgctaagttcgtggtgataccatgacacatcgataggtaactaacacaggaacaccttactgtgtgactgtagcaaatgaaacaggtagaattcaacagcaaaacatgatatcattctcatccagacccccaagtcgttgctcttcttttacagaggaaccatctcaagtatatatcttccagtaattagaagaaaatgttaaacatgtcattaaacaaagaatggaccataggctttgtctgggatcaataatggttgtcaaattacttgtctgatcctagtagcaccacaggctcagcaggttcagcatggttagtaaggctctaccagaactttaaaaggaaacacgttttggtgataaaatagttgtattcatgtccagtgtttagtgtggaagccggagaccactttctatgagagtatatttgttcaataacttttagctgattgagataacagcatcagtttgttcagctggaaaaaagtttgcccaaatggcaaaaaaaataagtcaaagtggaaaaaaaccctgacatttcagagcatatatggttagtaaaaatagaccatacttctacaatttacaatagtcacagtacatctctgaatttactctctctctctttctgtgtgtttatatacatatatatagtgaactgtactgaattttatatatcgtagtgaactttatatataaaatgtataatatacatgcatatatacatatatctttcatttttataactatttttagagcagttttaggattacagcaatattaagcataaggtacagagatttttgtctatcctttatgcattatagttcctttctgatattcataaaatgagatacatttaggaaaatctgactgtggtacatagagagagcttgatggggaaaaataaaacatgcttcaacaaactttaaaaaataatttgcgatatttagaacagtaattgtgcctacacgttaaaaaagatctagagaacaaaacataaagattctcgatatctatagagttgtcattgctcttgtatgggcacaaccaggacaaatgtgtctgaagcatcttttggtgagttgataaaatagtgcatgtatttattccctgcactacaattgtcaggctagaggaatgaccaatttaaagaggagtcaaagaagtacagctttgactagatgacaactaattaaaatcactattacagtaattacagtaatgtaagaaatatgatgcattaatcgagcaccgtcctcagaaggtcttagtggttcataggctatttatttctctttcaaaatatcctgtggagaagacagcttcgtaggcatatgtccataaatattttatacattgtcaaaaacttaaggccaggaatagatttctttcaccatatattaattacaaaataaacaaatactcagcacctttcagattcctaccaacatgagatctatcagaaaaatggaatctggaagaaacacttgctttttggttaaaataatttaaaataatatttttagaaggaataaataaatgtaacttaaatattaatacagggtatatagagagacctgaaattcttggctcacagtaaaggctgattttgccagtttaccttgatcacaattcagtgtcttctgattttggtattggcagaatttcgtgatagtgagatggaactgaacaactctaaaattgagaccttaataccagaaaaatatagtatttctttgtacagcaagaagtgggaaaaattagttaataccttttctaccttaaggtgtaattggattcagaaaaagactaacttaaagcaggaccaggcctgacatataaaatcctcacgaggtaacaagaatcagtttggtttgttcactgtcatttctcattataatctttgtcatgagaatggattcatgttgtgccattttctgttcctgttacaatctttgtcacatgaataagatatcaggatgttaatgcctggcatacagtattgtgtgtgttatgatactgtacaggactacgctgacctttgcaatattatgtattctgattggttgttcatgtcacctctttcccacaagttaataaggctgtaaaaaggagagaactgaaatggccagccagtcaaattatagaatattgaaaaggtcagagcagtccagcacagagaaaaaaaaattatggaatatatggtgcattaaaattcttgtgacaatgattgtaacaagaataggaaaggatacccatttatgttattccaatctagagaaccccataggatggtattctcgagacagcaatcatttacgcatccctgagtcatacatgtgaaaatatccatttatgctgttttttccttaaaaataattgcatagattttctactattcaacaaaaaagagcattgaaaataagattttcatctcagaaaaggggcattaatattgttaacatttcagttaagactttatatttgagactaaagaaaaggtttttttataagtaaaacctgttgttcatatgagatttatttggtctattttttcatgtaacacttttctttgaaataaaataggagagtaggactgaatgaattaacctttttcaagaccctttagaatgtgggatagaccgaaagagcagttaggagtttatgtagaaattctacatgatctatgcaaaacttattttatctttatgatgtgtgatgttggccaatacacaaaaaatcttttcttcctctgcatcttcagtggaaagatagtgacagagagaaagaggtataatacttaaatcagaaaccctgatgttattgttcttaagtgtgcaataattacttatttttcaaattgtttttatgcatattttaaattttcttgtagaacaacttcattggattttgtagcctataaggagacatctgttttaaaccttagctttacacttatttcactaatagagtaaacatgttatagtccaaagctagtcaaagctagtgatcccagcaccctatgctctgatgctcatccagtaggcctggcgtagaattcagatatatgaatgtttatgaggtaaccccaagtgattttgatgtaggttgtgcctggaatattggtattggcaacctcattttgcaaagagctaagtgagacccccagttaaagcccaatggctcagaccaagccacagagggtggaggagggcaactcaacttcaaatcacagtgcttgggtgggggcgaagcaggcagtggggagttgcggttccagaactcagaagcttaaaaggtcttgcaccatccacttatactcacaaatagggtcagattggagggccaaccagacaggaatggtcgcctgcgataggacacacttatcactttcacattttcaagcttgatttttgaggctgaaccaacgaggctgcattttccagcccactgaaagcccagtttatgcagtgaaaagtggcaaagcacaaccatctcaacaagaggaacctgagcacaagcattttaaaaatctacccctccccgcccatattgaggagcccaaattcctaaagttcaaaggaagaaaggaaagacagtgagagtgaaatggaggaagagctaaaatctgtggatcctgctttggttttgaatctggaaatttttgagcttcattgagggctgaaatcctgtcagttactctaggtctgtgaattgaactgtatgtttgtaggggtgagagaacattagactcactcagctgtatagttactggagatgtacaagttcttttttgagctgagcaaaatggttatgtaattgcatacttctcataattattgagtaattatatacttcttataattactgagtaatcattgttctataactagaacttaatgttacaactaattatataattaccatgtattaatgttgttatctaggaagcttagaatgaagtgctacttatatatctccccctgccatgccattttcaaagcaagcagtagtgtttgttttttgtttgttttacagttcaaaatttccttaaaaaacaaacaaacaagcaaaatgcaatggaaaaaacttcaccaatattatactcatacatatttactcattgattttgtatttgtccctggctgaaaatttgtaaaattatattctcatggcttaattttagaatttccattgttgctttacaaatttcaatcttttataagacctgcacagttacgctacttgagagtcaattgaatatctgcttgagtctataggacaagctgacctttttgaaagtttacaattgagcatgtaatgacagcagaaatacttccaaggagctcaatatcatggggacaggaggagatctccccatgctgaccatgtaattgttcttaggcaatggttaggatggtcatatttaatcttaaccaggtttcttgagtgcaagaattatgtcttatgtacttggggcatgttctcgtcagtgcctagaaaagccttctccttgcatgcagttggagctcaataatcttcagtagaagcaagctgactagttgtaaagaacctaggaaagctaaaatggcataaattggaaatgtctttttagtgcataatgaaattatcaaaggctgctttgtaggtttcataatgtcttgctaataagtattacacatatagaggagtgcattatctacttacattttaggaccttgaaatcattctttaagctatgaatatgtctttatctgcctttactgaaagtgaatagaaattatcattgtcacgttttagcccacaagcactgtttatttcctttgaagtaaactacttatttggatgtgccaattttgggtccagagtaataaattatattatgccattagggctttcttctgctcatgaaaaaaactcctgagtattttgtaacagtagatttttcagtgacttcctccatccctaaatggttataagtatctttttaaataactttttgtatgtttttacaatttgttggacctacccatatttcatgaaaatagtcaagtaataaccagatatcagaccctcttttgcattatttgatcttcattaatttcagtttgaaatataatctgatgggacaatgacacattggtaatggatgagattagtgctgctttattcattgaaaaaccttagaattttgatgaataatacattgttaggttggaaggggtagagaataggtaggtaattgctactgagaaaatgaaatacagagtacaaaattcttaatcacttgctagttctgaatggctagaatgtatcagttgtatggattacaacaaaaacaataacatcattcctagctgttgtttatgagcaactattatgtgctggatatgataaagaaataatctcacttaattttcacaatagcactgcaatgtaaatactgtattatcattcccagttcacagatgaagaaccagacattcagaaatattaagtaaattagcaaagagcacattgctaaagaatacaagaacaagttcaaatgcaggacttttgacaaccaaatttatgttctttcctttgcactatactttgctactaaactgtgttaaaatataatgtttttgtaaatattgtaaaccttgcattttgtatactatacgatgcaagatcacttttagtatgatgccatcttttactttttaagcatttgttcaataaagattatatcagtatctggagatcttgccagtatgcttgttcttctctttgaagctcaatatcatgtgttttttaattcatttgtctatatctgcagaatttgtgtgtgaaagattgaatgtacatataataaaaagtggttttatataggaaaaaggttatttgaagtaaatattggtgctcttttagataaaaaaatctcactctgtgacccaagctggagtgcagtgacacaattatagttcactgtaatctcaaatttgtgggttcaagtgattctcccacctcagcctcctgagtagctagaactacaggctcataccaccatgaccagataatttttaattttaattttttgtttttagagatgaggacttgctatgttgcctagcctgggtggtactcttaatcattcatttttctgttttttaagagttattgtatcatttctaaaagtgacaaacattaagcagcatttaaaaaattgtctcataaatttttcaggaaagcatctaatatagaaaatgttacaattttcatctgtagcccttttcttattttaaccctaattttttactcttaacctgaaatttaacctaatggtgtaagagagagagataaaacactgttactaggcagaagtattttcctgcattttggactgatgagatttaagaatgggtttgctaaagctttggaaggacagtggtgttgggaccagggtgaggatgtattaaaagtgattcttttatatagctaggcagcttctgcattttctcataaagctaaaaatattagatcttctgatcaaagtggacatatagtacctcccatccccagttgcttttcaagatattctgactaattgaaatttaaaagggcattagatagaaagaaatccacccacatttcaagcaaagtgaacagaaaacacctcagtttgtgaaatatacaatatctgacaaatatgtctgagtataatacgtatatccagaacaattctatttgaggaataatgtgttatttcttcctgtctgcacatccaaaaaaattcagggatttttattggaaaaaaaaccctcaaaaaagtataaacaactcatcaagtaatcaatttctacatttgtgcaatacttttacttatatgcttgatacttgtgatatggctttatcctacagttatctaagaatattcatcaaattatttcgattgccgtgatgaatgaattggccaggtcaactcagatagcacttttgttcacaagataataaaatccaaatatgtgcattgatagaagcacatgtaatgcctcttagagtggtaaagttacagacctatttggtacagtatatttagaaactcaagaaaatactcaaataatagcaggaatgaattcttaaatatgtatttattttaataattttcttttttaatcagtaggtaataactacacccttctgaatgtcacaaaagtcatgtacagcggagaagagacaaacctttgggtgctcatcgatgggctggttccttttaccaactatactgtacaagtgaatatttcaaatagccaaggcagcttgataactgatcctataacaattgcaatgcctccaggaggtaagtctatgcaaatgttggctatctaattttatataaatgccctagaattaagtttccattgaataccttgtttatttttagaggtattttattttagaacttagaggctcaattgtatttctggttcttttaatagttgttgttttgctttgtttattcagattctttaattgacgatcttttattgttttgttgagactgctttcatccacctcacactgtgtgtatgtgtgtgtatataccatacacacatacacacacacacatatatatatctggatttctgcatgttaagaaaattgggaaatgattttgttcaaggcgttacttaaagccaaaatttatatttgcaatttgagcttccattttctactgcaaatggttctcattcctggtgttctaaataactagttcaattgtatacttaaagtacttcatttggcaaaaagggcagggtgcagatgatagaataggaaaattccatttgcactactggaaaacacctttaaattcctgatcctaataattacagttcagcagggccacattcatgtgtgaaatgtgatacagtctgcatatttttattttaaatatttctataaaaatcgacctattcacaattaccattattttgatgtgccttcagcttcaccatgttttaactcgttgcgggaaataatcgcattgaggaaaacccctctagggttgacatggatggcccttgaacagaaagcatgcctcaaaatgttaagagcatgactctcaattgagtgctaaagaatgtgtgttttctgaaaatcctgaaggcaaaggaccccaggacatccagcatctgccctgtagcccatctcccaggaatgagtatattctgaactaagggagaatgtcacaatcttttatcagcaatccgaagggcaggttaaccccacttccagttatgaagagtataagaacacaaagtgctttatcactggagaaaaataaaagggaatcttcagtttgtatggaaccgctcccctgcaaaaaagattcattacttgttgtatcataaaaccacacactattatctaccttttatgccattattaaaattaatgaattgatgtttactaaaatacttgaaactgtaaatgtcagaagctacattacttaagaaaagaatgcataaaagaaacttttgaggctgatcaactcaggttagtatcatatttattgagacaataattttaaaagggaattgaatttagatatatttatttaaaaattgagactgaaacccaaaataaaacaaactccccccgctaaaataaaccttaggtattcatatcttcatttttcacttcaatacacatgctaggaaggatagaaaactgtgatggctctaaaccttagaatataatatcctttactcaaatttagaaattaaagagtaatcagtgccataatggaggttttaagttatatagtaataccttttctacaggatatatacaatatttaataagcgtgtttattttagggtatttatactgattaaatagtttgtgatttacagtaatttatatcatattcataaaatagggcaaatttaattcattgtttatgtttttaggaatgtatggtctaataatttgttatttatacatatatcaagattcaattaaaaatagcaaggtcctactgctaacggaatatgcgctatgtgaatatacctgtcagtaaaagggttaatattatacaaatagaaagaaactaaaatattgttttatagtggtgcagtcaaactgagtaaaccattaactgaggcttatcttcatctttgctctgtggatgcttatctgtgtcattaccataatgcactgcaggcccacactctctgggcctgatgcaatcctccactttatgtattcagaaatctagaatttgggagtcagtccttcaccaaagaggaagcaaatgtcttcaaagacagacagtgattcgctaaagtttattatggccattaggacatactttcttttttcattagattgttgttgattacaattaggaaacgtatagctttaaaattatcttttttatgaccttgtggcagtttaaaggtgatacctcattgattaaataggttttagttcatgcttccttttacttaatgatctgaaaacatattatcctgatttacacataaaaatcatgctgaaaagcatgtggcattcactagaatatgtgtgtttaagtagaattaaattagtactgagagttattaaagaaatcttccatgcctttgtccagtgaactgtgtttcattctgaaatgaataataaatggaccaatatacggaggcaaaccaacttatgggcagagaaggttctatatgctatttacttttccattatagttggattgttatcattattgccatttccttgatttcaatattagatctctcttatggtgatgttgaattcctagtatctttcaatgctgggtgatgcaagatttgtgatgataatatccttagctatgcttcttttgcatacttttaaaacataataagaaaagagttgggcaaaataaaatgctcttttttacttcatcaaatatttgctatcaaatatgacctggaaaatcccctttacccgtttaatctggccaaatcctactcattttttagcctcaaacctagaaattggtctatcagaaagtcatgttttgccaacagaggctgagatagggcctttctgtatcccagagaacagttacattatactgaaattgcctgtttaatctgtcacaatcactggttataagatcctatagagtaggaactgtttcttactcacatttctatcttcagcacctagactaaacctgacacatggtaggtgcataatgaataattggtgaatgaataaattagtcaagattgcttaacgacttgttttaaattttaagcttattattactcaggccctccaggcctcatctcaacctcagcaaccttgtattttagccagctgtgaaagagaccttctctgtacaccactgtccaatgtaggaatgctctggttatgtagataaaattgggagctcaaactgtaaggagggtgagtgtattggaggtgagaaatattctcaagttatgccaactcttcattcttttattcttccctatagtggttacttttctcaggtgagcatagaataaacaatccttagtttagatagtaatttggaaaggagaggtgaaagggtcatactccaaagaattttaccaggatacatcatctcttaatttgtagtcaggacacatcttatttgccagtcctacctctatttttctgatgagaaaaaatatataattaagaatatgataaacacaagttatttgaagatagaaattaaagtaagaagatggtgctactaataacttggcacatagatgaacagtggcaaatcccaattaacacacattttttatttgaaaaattcactttaaatattatttggacaactggaggggcgtctctgttttttccaattatgtagcagatccttccctacttctgcacactcaagttttttgtatttctacaattactatatttttaggttgtttgtaataacataatgctcatatttagcactaaggtattcttggaaataaaggatatatttaatcagagctcttgaatagtattatggtacaggttcaagagttctaggaaaagaattaaaaaaataaaaacgaatccaaatgttaatccataaatatgaaactttcctatggcctttaccccttcaaggtctggagttactaatggggttaggatttcaacgcttaatggggctcagtgcattagtgttttgtatgcatggaattcagcattcagtttaataagtggttgacattggtgatgtcccttaatttgcttaaatctaattggctcttttatcagtcaaacctgtatggattggcaattgatcagaaagggtcagccatgactctgcatgtagttaaatgatggaagcaccagttaaagtcacagttgcatgataataagcaaaagaagaacaaatgagcttagaggaggaaggcaaagaagcttagaagttttgcaggatcttcaagttcagaacaaaggcattatagagtatataaattttaaatacactgcattttgcctccagacttaaacctttttttttccagatgaactgaaatcttgtctgaaactgtctttgttacatcaaagaactactcagaaagctaaaagagacagaagaagcataaaagggcatagtttaaaatgattagtgacaaattccatactgacgagctagaaacagatttttaatgaaagttttatattattccaaaaggaataattctgtttatctttttctgaactgctttattgtaacagtgaaaggaacttggagccaccctggtttgtgaacctaatccaattttcctctgagagtaaataatttgtcatttgtacttttaagttgatgagaattattataatctacaaacagtgtaaaatactaggcttgagaaaatctgtttatttgcccaaatgtgttattagagaaccaaaaattgaaaaaggcaaaatggttgcgagtagtttgttttacagggtcttttcgactctctctccttcccctgaaccccctctccacttatccacctaaaatatcaatgagaaaaaaaagaaagaaagaaaaccattaggaagtaaaacttaggcacatcgcaaaagcatagacgttggagtcctagaaacaaggatttaaatccacctctttcactcactgcttgagtgactatgagcaaatctgcagatataactgagcttcagtttgctcatccattaaagaggctggatggtaattcccacctgactggaggattgaacaacatattatatgtaatgtgtttagcgcattgcctgtcttggtaaacatttggtgcttcctacctcttttgttctattttcctactaagactctttttggggacctggaaaatgccctatagaaaaagtaagtaaaaaaacctgtctttcacatagactgcagagaccagaataatttcatcttgctacatccctatcctttcctacacttaccccttaacatgttgacatacatatggccaggccagtaaccctgctaaggggtggttgtgatgcatattagatgatgaagtaagcaggaagcatgggaagtgattttctttttgaaataccttcagcatcctcctccatgacctccagatcataatttgcgaagatttttacatcaagctctcattggtcatcttgggatttcacatattttcttaatagaactcttcttctgtgtttatatagagctacttattaaatataattatgactttttaaaaaatgtctattattgtatattttattcacaaatgcttttttttacattgttaatgctagcccaaagcaagtaatttgaaattttatcctaagatgttttcatgttttcttaattgtcctcaaatacatatatttaaaagttacatcttggaattcaaactttttttcatttttcactaaataggaaagtttactagttgttcagccaatatgcttttgaataactaaataaaatgtttgcttttaaaagatgttagtatatgatttttgcccaataataccactaaaggaataatatattaatgactaacttttttagcttgaactactgaattccattctgtttagaatttaagagactggaatattctttcgggtattgctgtgtaacgagtcactccaaaagtcagcaacttaaaacaaccattctgtattatttctcacctgattgtgtgagttgtcagcatggttctcctggcttaaggaggctggactgggcttcttcagaattcccagaaagaaactcagggtttcaagagtcaagccctagtgtacaagccctgaaaacctttgcttgcctcaaactgtccaaagcaaatttcttgcccaagtcaaaaagcatgtatgctggaatgtatgatttactggagcctgataatttgtcaatcttccataaatgtctaagtgattggtttttagattgtgtatgtgtatatgtacaaacacatacatgcaagtattacagatacataatttttcttttaaattagttctgcttttgaaataatgatgtactagcaccaaaaaaaatgaagaaagcagtttactaaatttttccttgaagaagatataaaaaaaaatctttccttacatgacaattaattttgatgttttatttcagtataaagatcaataaatgtatatcaatagattcttgtttaaaatgtttgtagctccctattggagggaaaattctgatctcttcttataagtaggtgatttaaaaaaaaatcttagctatttctcaaatctaggccttgggtattctgatttctgcttgtaactttgaactgtgagagtagaaactgtgtgtaatttgaatattttctgtagctccagtgtctggcataaactatttgctgaataaattaccagagccctttgtggcagtgataacttggaaaataatcctgaaagttatattttgctattgctgtgtcttttacttggataaacattttccagaattaaattcaacatttagggtttaattcatcctaaaattatttttagtcctgttaagattaccataacagtgtaaaaatacataatataggaccctctggaggtatgtttataaatttgtgtgtgtgtttaattgtctattttacctaccattttattttttatttttaaataattccatcttttatattatgtttaggggtacatgtgcaggcttgtcacatggatatattgtatgatgctaaggtttcaggtatgattgatcctattgcccaggtagtgagcagagcacctaatagttttcagttctttgctttctcccactgttccccttctagtagtttccactgtaaccaccattttcaattaacttatctattgtgattggtggttgaacacttaactgaaaataatgattaaaacagaacatccaaaaatttaaatatatattaaacacaactttaatttagaacacataaatatatttatctatatatttatccaacaatcttgttatatagggccaagttgttttcttggagtgttaatttagtatttataagtccagcatatttgctgccaaaactatattcataatgcatagtttgatttccactttgaaaactcctttaaaaggagaacaaaaatttagagataattaaggaagaatctaattatagaatttttcaggcttttgtaatatcctaagtcttttagttatttttcctgaacgaatttcacagtattgttttattaagtcctcactgaaagtttttcaaagcagtaaattttcatagaaaacggtttctgttaacagtgctcatcagtttaagcattatttaattaaatgacataatcataatgacaaccacaattgacatcacaggtttaaaaaatacagctgactctttgtgagtgtataattctacctgcgactgcagaatgttgcccttgaactacagagtagtcaactatccatctctgcaatacagagtaaatgtaaattttttattaatctggcaagtcagataagaataggtaggtaaggctgggcgcggtggctcacgcctgtaatcccagcacttcggaaggccaaggagggtggatcacctgaggttgggagttcgagaccagcctgaccaacatagagaaaccccatcgctaccaaaaatacaaaaacttagccgggcatgttgtaattccagctattcgggaggctggggtaggagaatcgcttgaacccgaaaggcggaggttacagagagccaagattgtaccattgcactccagcctgggcaacaagagcaaaactctgtctcaaaaaaaaaaaaaaaaaaaagataggtaggtaaagcaagtgtctactatttaggaaaaagacacgcttccaaagtggcagaatgatccaccctcagagcagcctacccaagtaggagaggcaggacaatgctaccaaattcttctcttaggttaagcattaccacagctctgccttaaaagaaaaaagaaattattgattatatcccttcaattgattagggactgagtctgagatttgtggcataacttgctcagtgaacttatttttctccttcagtttttaaaggaaagaactgagctttctcttctattttcaaatttcaaccaaaatctctttctaagaccttagagcaatgaaatgtgtgggtagcactatcaaccagccaggtggagaatggtatttttttttttttttttttttttgcagggtctctaagagaattaggggcaactagaactggctcaaaaagcaagaatatacgaaagagcaaaagagtaaataaataagaattgcaaaaacaaactctattgtatcttgcactttcttcatgcattgtagcactgagaattgtaaaatatttctataccttttgtttgtttttgttcttgtttttttgagacggagtctcgctctgtcacccaggctggagtgcagtggcgcaatctcagctcactctatgccttttaaaatcaacttagtacaatgtcaagatgctactttttaaaaataaaactaatggttctcaaaaatgtgaaagcttgcttgccgagtacagatataaagctcctcaatatgtgttttccatttttcatctgctctgtatccacttagatttatttgaaatatataaatagaaacattaatgtgcaggtggcaatgggatatcttaaaaattgaaagagtacaaagggatggagattttaaaaataaacgtaggttagcagctgaaataagcaataggctaagatggtatattcccttattcagagggtagaaggaaagatgagattaactgctttttataatgtaaaagccacaatgaagatacaggatggtgaggaatagcattctttaaaacgacaacattctaccacataaacagatggtttgtctttaccttcagtatattaaaagctacacaatttatattacatccagttcatatgaatctttcgaatagttgtgcataatgttttacttctgtgtatatcttccaaatgtgctgctattttttccctggaaaaatcaacccattgaaagtaataaagtaggagaattcaacaaataaaaagtatttaaattcttaataaaataaatagtgtgctttcaaaaacacataccaggccatttaatttaacccatgctttctcccaggtacgagaatagaaccaaaggatttatgactgtcttaaacatgctctcaaatcctttcctgaaaagtgttacctttacttttttggaattgatagtttaacctgctttgtgtgtgtgtgtgcatgtatgaagaggtatatgtttgtaatattacatatcataagccaaagagagggataaattcctgtttcataatttgtgaacaattttttcactttttgtattcaccatcttgacaatgaacttcctgcttataaaaacaccttagaaaaagactaacttctgagctatggagaagagggaaggaaactttgaagtgtgcttactatggactcaacaagcctccagcaaagggctgccagctctccatatttgcatactctcatgtggattatatagaaatacacacgcccacacacacaattaagtgctatctttaaagcatcctggggcaagagagagagacttaaaaaaataaaataaaatcacatctttttcttttttaccaggggagaggggtgggaaatattgttcctttaagttccattgatattttctaactcacatttttaaaaagaataagtacaattcattttctttttttttcttcgaagacggctttatccataactttaagcttaaaaaaaaaaatcatgtctgtctgactgacactgcagtctaaaagcaacttgaagttttatttgaatttttatagtgccctaaagaaatttttgctttatttctttaaaataatatcttgttcctcattttttcatagacaaactgtatgcctgacttgcataaaattctatgaacatttacctgcctatataaatactcacaaaagtgagaaaattcttaatatgtcttagatacttagagaccatatttccaacctcttttcatcagcagcatcaagaaaatccctttttctatctctataaaggcatatagaccccccagagtctaaaagaaaacttaaaaacttaaggaagaatagattttgacaacagtagggaaattcacttacaaccactatgcttttcatgattgttaattaattgggacaaatgaaactagaaacatgagggtatctaatatatactttattagattaatccctcttacactttgatgaccattttcaaatgtatactatctttcatttttatttaaatgtttcgtatgcttgtatcatgtcttatctactagatggggaagataaaacgaatgggctgggtgtggtgtctcacacttgtaatcccagcactttgggaggctgaagtgggaggattgttgagctcaggagtttgagaccagtctgggcaacatagtgagaccccatctctatttaaattttaaaaagaagaagtaaaatgaaaaaaaaaatgagtgggtgaatggaggtagacagaggagtcacagctggtctccctttttctttctctatccctctcaccatttaccttggctcaggcatataataggatattagtaatgattactatcatgctcttgtgcagtcctagtggcctggggctatttttgcacccagcataccttcaccctttcttttgatgacagggctccaatttccctctcagcaccctgggctctttcaagatcagaacatgcacatgcgctgtgtgtgaagttgactgcatcaccaggtctgaccaatgaggacactgtattctcctaaccacagtgattttttttcaggaatgacaggcattccaatcaaagccactgaattgcagtaaaccagtacagtaaacagaggcatgtctcttgccctgtatttgaatatgggattcggctcaatttgctgccagccatgttgcccctcaaagagtctgagaaatttagtcagcaaggaagaaagcagagtgggtatgagagaaggaggtagactagattctggtgacgtcatttgatcctttgaatccagcattgccaaaacccagctctttcccttgagtgtttttttgtttgtttgtttgtttgttgattacaggaacccactacccatctcattgcttaagcctctatgtgttgtgttttctgccacttgaaaacaaaagcatttgccacaatgcttgagagaaaggaaaacaagtagagagcatttagagaagtctcatcacttcctgaaaatcatgccaaatgctaaacttaacatatgtgtttggcttttgcttgggctctcaaattaggaaacctcaagaagtaagctggatgtcacatgagataatattttctaaaactgtgaaatggctcatcccattctgaagggtctcctcagagccacttcatttgacaatcttctgagctgtttctccactattttcaggtctcagagccctgagttctagtaataactcttgtgctaattagctgtttggtctgacttaagtaactttacctgactatgatgttggtctcttatctctaaaatggcagatgtgaattagatcagcagtatctatagtgtgatcccagaccaggaacttcaacattccttgaaatttgcttgaaatgcaacttctcaaaccctactctcaacctacttaaccagaaattctgagggtggggccaagcaatctgtgttttaatgagattccattaccaactcccaggtcactgggtgccttcacaagtttgaagaccactgagctagaccatctttaaaatactttcaaagaaaaaatatatgatcttgtctatgactttattccatattcatatttgagacaaatactcagggaaaaataggtataataggcctccatgctcaactggtctttgaatatataagtcacattcgtagggccagaggtctttccaatgtaagaaagccatcgtgttgctcacagtcttcctgaatgggccaggaacagataccaaagataaccaattccagatgttgagttctacctgtggcaccagaaagcaacaggcatgatgttttatgcactggggaacactaatcagccctactgtgaagacactgtcagctaaatttcctttgctcttcaacttcttcacagaacatctgctataagaaactccttgtaactaaaacctgagtctttcccctctggggaattttctttaatgagcctcttgtggctacatctgtacagttttgaaatatgtttcctcaagtcagttacatcttcatcctggattctagggtttgctgtctattggacctcatagctaagatttttccttctaggagttcacaaacacaactccagagtaggttgacatagtgcccagtatctagagaaaaattaagatcatgtaaccttttatttgctaaaaagagatttttgatgttgtgatcactcataccaagatagcatttattaatactaggtgcaggtgtggttttgcatatattaactcattttattctcctcacaaaccctgtaaggcaagtgctattattatccctatttacacataaggaagttgaagaaacaatattggcttgcaactagtaaaggtcatcttactagtaaaaggcagacactgtatttaaacctagagactgactatagaagcctagttctgagccactatactctattgttctactgactgtagaactatactctatttcttctactgactgttcatatgctctcttggcagcagcaacacagattttgatgccccactaatcaatgcagatctgaagaggtgacttgactctatagtagggtcaaatataattttaagggtattgttggttgaactagtaggtttttaaatcctgttgcagatggcctagagaactgtcctcagtgactgtataacccatgctctaaagtttataatgtcataagagaaaaaaaatgtaggtaaaacatgtttacagccttacaaaaaagcattaagcagaagcaatattatgtggtacgtaccctgtgtggagaaggcaaagaaaccaaccagttggactcatcctttgccagtgtggatataagtacttaacttgcccaccaagtattttgcccaacttctgtcatatttacctatgaacttctattataaattattataaattgtgatcttctgattgtacatagtttgcattcttgtgaagagacttaatttatctaatagtgttaattttgaaaaattaacaaactttcttaaaagagagcaagaaaacttatatttgtaaaaactaatgaaagaaagaatctttttcttcctgtactaaaacaattttctgtgaacagttgaaaaaacactctagtcaggtgaagacacttattcatatgtggaatattctagaaataagccatgtgaacagtatgagtatgtgggaaaattgttcactggaatggccacaaaatgaccatgcgtgacctctgggccataagaaagcaggaatactttcctcatcaaaatctgaagttgagggcatgatcacaggaaaaagcttaaatcttattcccatggttgatgctataaatcaagtaagcgtgtatcttagactgtgcatttgtaaagcacagtgtctatcaaaatatcacaattcaacttatccaccacttgctatccccagcattttcatttcctgattgtgtgaccttgagaaacttttctcctctctaagcctcattttgctcatctgggaaggggtttcataattacagaactttcctcaatgggtttagacaaggaataaagaatgtgtgtgcactgagattagctggcacattaggtagctgctcaattctttgtttaaaggacataaagcatgatatataaatacaaaatatatgtaagcttatcactattcagttgaaaattaacctgtaaacatctacatttttatcttctttgatgattccaacagctgtctctaaaactaagtgtaaggaaacagcagactggttgtggcatattaaattataagtgaggactaatttgaggatcaaagatgctctttgggagatatcgcctgactagtaggaaaagcattagctgtctccctctgtctcatgtatttgttctctctgtcttggaaatatccttccccacagtttctgaatcttgatgtttaattgaacacaaaggtctttgagaaacacaacagggggttgttcctggtagttctagcattgaggaaattgaaatgtacattttttttctcatttatcaaagaagggcaagaatctaaactgacattttatatcaaatgaattatgaactgtgtactttgtacctaagggaacaacaactaaattagagttttagttaagagagagagagagacaaaaataggctttgaataaaacatacagtaatttctgctactgtgcctgacagtgacatggccagatacagttctattgtagaactagtgactggatgcaggctactctgaaatctttaaatgtatttgagagaccgtctcagaaaaaattaaacctaaatttcttatgttgttagactttatggtcagtgaaatagtcttgataatctaaagttaactttcagctttttatcaatgcttactttcttaaaaaaaataatagttgcaaagttttacttcttgagaaagtatgaaattataggttgcttgagagggaaaatacaatgcagaataaaaataatatatatgaaaatgccacattccatctctcctctgattatctgtaacacctacacaaatactacacactacactcatatgttattgtgctcataaagagtgtgaatcctaagatcagtgggacttggttcaaatcttaatttcccccctcctactagctgtaagagcttcggcaagttatacaatcagagtctgctttactttgttcttctgtaaatggtagtaaataataagcactatctcacaggattgacactgagaacttaattatgatgatgcctgcaatagatacaacgtgatgcagtacacatagtagttgttacgttgcacagttgtttccttccctatgtgagaagattaggcagcagcaaattagaactccattatttaatggctgctgattcctgaagtataggaagtattagaattaaaattttaaggagaaggaccctataatgtctgtgcaatatatctaataatcattttttaaataaccaattgaaaattcttgggaattgggggtgattcatgctttcttcttctggacaaagctatgtattgattaccatatttttcttcacaaataagtattccaatttatgcaatataaaaataaaagaagcgttattaatatgaatacatttgttttagacttctaaatccccctaggttcataaacctaaaagtgacaaaattccttgatattaatcccatatgctttctgatgccaatgctatactggataataattttgtgactaaattactagaaacaaataactatcactgatagcctgattacaaattttcttcatataattattgatcattgctgtggtaaaatgaatatcataatttttattctcaaatgttgattctaactctactacttataaggtgaaatcagttcttagaagtctttcagcagtttaaattctgccaatgactattgttttattcttactaatagataatgtgaaattaatggcatgttgaggtaagggatgctgtcttgtccgtttaggcggctacaacaaaatactatagactaggtgccttacaagcaacagaaaagtatttcacacagttctggaggctgggaagtccaggatcaaggtgctgacagattcagtgtctagtgaaggctcttcttcatagacagtcattttctttactctaacttcacatggcagaaggggtgagaagtctcccttgggtctctattacaagggcactaaccgcattcatgagggctacaatatcataacctgatcacctcccaaggctccatctcctaatattatctccttggcggtgagaatttcaacgtaagaattataggagggacatagaccatagcagacaccccacatttaagtattttaatgctagatctagttagtatttgagtaatttaattaataaacttgaatattatatccaatcccgttgttacaatgacttttataaccaatctgctctgattcttcaatcattaaatgactaaatttttctccactattcaaagatcacttaatttcttggtatttgattgtatcttagaatagtggattcaatggcaccatagaggaagagtccaactctaaaatataatggtttattttctacacgacctcagtcattttttgttttgtttttgagaaaggctctcactttgacaccctggctagagtgtagtggcacagtcacagctcactgcagcctcaatctcctgggctcaagcaattgtcccacctcagcatcctgagtagctggcaatacaggcatgcaccaccacatccagctaattttgtattttttttttttttttttttttttttgtagtgatagggtttcactatgttactcagactcgtctcaaactcccgggctcaagcaatctgcccatctcagcctcccaaaatactgggattataggtgtgagccactgtacccagcccctcagtaatttattttgctatttttcttgttggatacattcaacaagggataatttaatgcagtcttcctgaaaagagtggctttgacttgagcttgaatttatttattgttaaccttgctaagcatatcaatttttaatttcacaaagactaaattcttcagtgaattattttaaatgaagtcaatgagcaatattagaatcaaaaataaaatagaattaattgaacagtattgttgtatatattttaaattatttttccaattgaagatatgctttaaacaaagggctcaagcaatcaggtactcaaggaaaaagaatttaatctatgctgcctagaaactaattggatgaatatgatcgtattcaaaataataggaatgctaagaaatgctcttaggaatactaagacgaattcaaatgtcgaaagcaaaggcttaactagagtgtctaaatgtaggaagtctctgtaaggaaaaggaaaaaaatttggttggtggtttgagacataacaaaaaaaaattcttctgggcattatgaccaccaacttcagggcctctaattagtctgacaaagtgacagttctacattctagttgaacaaataatgtatctaatgaaattcaaaatcgctatttttctctgagcacagtgagctgcatcattcacagctttggggtatttcaaaattaacagaggatgacttcagtctgtctgatgtttcttggttaacaaattcactgaaattgtcttgcagagcaattttaagcaattctttaatcttaaaccacaaagagaggtggaggtggaggtgtattaccttggtcctatggatgctaatgtgaagtggaatcttttatttctcaaaatggtcaacagcaattagtattcagtggtgtctttttattctggtgcccttgacccacctctgcccccctttctatattactcctattatatactgtaactggggatattcttgcttcttttccattctaattaaagcattcttagtgaacatgggaaccatttttcatttcatgaagaataattactggacctaggtgaaatctgcccattgggttttatataatttttgacaaatatttgcacgaattttgactgatctattcttaccatttctccgtgaaatgttggagaagttttcagttccctcagaacaataaacctaaatatgtacgtgaaagaccaagataaatgttgtaccaccttcaggttgtatttgctaatgtactttaaaatattttattttgtcactaatataagaaataatgatgactttttaacaatttttttttttatttttgcacatgtttctttcctagtcagagtttgacctaaatactcttctactacactagtgacaaccttgagaaatatcatttatttaggttggatctgtaaaacctatagctcttgttatacatcttgtttcttttttttattttattattattatactttaagtttcagggtacatgtgcacaatgtgcaggtttgttacacatgtatacatgtgccatgctggtgtgctatacccattaactcgtcatttagcattaggtagatctcctaaagctatccctcccccctccccccaccccacaacagtccccagagtgtgatgttccccttcatgtgtccatgtgttctcattgttcagttcccacctatgagtgagaatatgcggtgtttggttttttgttgttgtgatagtttattgagaatgatgatttccaatttcatccatgtccctacaaaggacatgaactcatccttttttatggctgcatagtattccatggtgtatatgtgccacattttcttaatccagtctatcattgttggacatttgggttggttccaagtctttgctattgtgaatagtgccgcaataaacatatgtgtgcatgtgtctttatagcagcatgatttatagtcctttgggtatatacccagtaatgggatggctgggtcaaatagtatttctagttctagatccctgaggaatcaccacactgacttccacaatgtttgaactcttgtttctttatttttctctagagtcctttctcagagccaagggtgtcttgacaagtaaaagagaaaaaagttactaaacagagagaaagagagagtaacagactaagaaagacagagacaatttcttcaaacctctactccaaaaaatcctcctcaaaatttaaacgacacatttgtttaaaacctcaaaattcttgcattctttcaaaacactgagctgttagattctaccaacagtatccgctctccaagttagttctttaggttcctgtgtgttggatggggaagaggtagggaaaggaggctagctaccttttatgtctgtgaggaagggcaaaggtctggtttggctaattttaaacaacattgtttaaaataacaggaacttgaactttggagacagttgctagattcaaacagcagcacaaacccctcattacttgtgtggtcttgtgcaagtcatttatgttatgaagcttcagattccttgacccacctacttcacacctaggactattaggaggattcagtgtgatgatacatacaaagcatttagtccattgcctggtgtacaataactgcccagcattaactctgacattgtagtgtgcttatgtttacaaatgaatatcaagatgttagcattgttcaaggggcaattaaccaaagtcattcattaaagttgttgagttgtttaataaacaactcaattaacataaagactctttaccaaaactttgaactttgttcaaatttcattcatccaaaagcagttgctgagctctttctagccaccaggcataactctaggtcctgtgcaaaacaggcttttggagcagatggcgtgcattccctgatggaactgaaggccctggccaccattgtggtgaagttcataactgcacttactgcatgttctggctggctacttaagaattccctaaggagatattggatagatcaaggtacttagagcttggtttcaccttctagggggagaaagggttgctcttaacaaaaactaggacaataaatttaaatgtgtttataaataatgatgtaagacaactatgtcaatgttgttaaagttggctgttacttttaagtacaaaattgcatattccttatttggtgggattactgtacatagttatttttagaaatcagaaaagttaattgatttactgtgattctctcgttttacaaaaatgcaaattgttttattatataagaagagtccattttagaccaaattcattcccataaaatgaaaacttcttggaaaaacaacaaaaaagaactttttaagaaaatgtattgattggtaactcatgacatttcttttctgttttgctttttggctcctgtgaatctcagaaaaaaaaagtctgttgctactcaggaggctgaggcagaagaatcgctcgaacctaggaggcggaggttgcagtgagcagaaattgcaccactgcactccagcctgggtgacagagcgagactctgtctcaaaaaaaaaaaaaaaaaaaaaaagtctgttgcttgacaatggctaaccttagtagaggttttgtggtacagttcactgatctttttccttcattattcagctttgttttcttgagttttatattaaatgtttttaaaaatattttggtaattatgcaggttaataaattataaaggatatctatagttttccccatctctttctggcattctaatgacatgaatgcagattccttattgatccatataagaatgagctcccagaagtgagtgtaatggaatcaagtagccagaaatacttagtaattggattgtttttcacattctgcactcaacttttatggaaaaaaaaaactcgaatcaaagtatatcaataagatgataaatccattcattccttttcagtatccagtccagtccatttaccagggagtagccaccaccatctgtgcctcaatattttcaaactaaacaacaattgtagtttctgtgcttaaaatattgatggaattagtgattccccatctccttcgtatacatttcagactctttatctgtcctacaagaccagtgtctcccacccttgctgccttgcttttaattcctcaaacagtgagatcaccatagagcttccggcccataacaggtcagcaaagtcttagtcatttaacaggtccaaacttaaataccacttccttagaaagcctttcttctttcaaccaaaattaagtcggccccctttaatgatacctcttagcacctctgttctccctcctagcactttgtgtacattttaactacatattgctttctatttgtttgatgccagtcttgctccacttgacaatattctcatgcccataatggtgtgactctggctagtttgttcttcattatgcacccatcacctggcacgatgcctggcaagggagtaaaggaggatgggtagatcagtttttcagggaatataaaaatgacagcacagttttatcacaaatgtttaatctttctgtatttccatatttatagcttggagattgcatagtaaacaggaaagaggatgaggttttgaatcaaaattctcatgtttgaatcccagcctggcacttagcacaatcacaaagaactgtaggaggaatgcaatactcacatcatctaattcatggtatggctgcaaggccaaatgagaaaaatggagatgcattcaaaaggtgagagctacatgagaattcatgaacacaaagaagggaaaaacagacacagggcctactcgagggtgaagggtgggaagatggagaggaacagaaaaaataacctttgggtactaagcttattacctgggtgatgaaataatctgtacactaaacccccatgacttcagtttacctacataacaaacctgcacatgtacccctgaacctaaaataaaagttttttaaaaagtaattgaaatgttcgtaactcaaaggataaatgcttgcggggatggataccccattctccattgtgtgactagttcactttgcatatctgtatgaaaacatctaatgtacttcatatatatatatatatatatacacgtatatatatatatatatacacatatatatatatacgtatatatatatatatatatatacacatacctactacctaccctcaaaaattcttagaaatttttttaaagaataaaattagacccctatctctcaccatgtacaaaaataaaatcaaaattggttgaaaacttaagtcgaagacttcaaactatcaagttactacaagaaaacattggggaaaatctataggacataggtctgggcaaagatttcttgagcaatatcccacaagcacaggcaaccaaggcaaacataggcaaatgggatcacataggttaaaaatcttctgtacagcaaaggatgcaatcaacgaagtgaaggaacaccccacagaatggaagaaagtatttgccaactatccctctgacaagggattaatcaccagaatatataacaactctataggaaaaaaactaataatccaatcaaaaaatcagcaaaatatttgaatagacatttctcaaaagaagacatacaaatggcagtcatatgaaaaggtgctcagcatcatcaattatcagagaaatgcaaatcaaaactataatgagatttcatctcaccccagttaaaatggcttatgtccaaaaaacaggcaataaataacaaaagctgtcaaggatgtggagaaagggaacccttgtaccctgctggtaggaatgtaaattagtacaaccactatggagaaccatttggaggtttctcaaaaaactaaaaattgagctaccatatgactcagcaatcccattgctgggcatacacccaaaagaaaggaaatcagtatgttgaagaaatatcttcattcctatgtttgtttcagcactgtttacaatagccaagatttggaagcaacctaagttgcatccatcagcagatggatggataaacaaaatgtggtacatatatacaatggagtactattcagccgtagaaaagaatgagatccagtcatttgcaagaatttggatggaactggagattattacattagatgaaataagcctggcacagaaagacaaatgtggcatgttctcatttatctgtgggatctaaaaatcaaagcaattgaactcatgggtttagagagtagaaggatggttaccagaggctgggaagagtagtggagggttggggagaggaggggatgcttaatgggttaaaaaaatagaatgaatgcataagacctactatttgatagcacaataaggtgattatagtcaataataacttaagcgtatatttttaaataacttaaaaaatgtaattagattgtttgtaactcaaaggataaattcttgaggggatggataccccattctccatgatgtgcttgtttcacattgcatgcctgtatcaaaacatctcatgtgccccaataaatatacctcctatatgccacaaattaaaaaaaaattaaaaaattaagaaaaaaattgttctcaagtgattaaaactaagatggctgggtaatttaagctctgtattgggtataagcagaacatactttttctaaaccttgtgaattttttaagtggttacaaaatattataggatcagactttgtaatttcataaatattattattacaaataatgtatccagagcgatctcaattatgaagtcatcaaggatgggtaagaaaattacagagagaagcaataaatctgaatgtacagtgcttatcttcaagtaacttaaaaggaactatgaacaaatgttcatagttttttgggatacattaaatgacttagtgatacttaagaagatactttgattgatgttactaagaaataataaatgagtaaagcatgattgtagttatggtgtgagtaatgatatgacaggatcatgtgatagacattgggggtaagataaagatcataacaatagcaaacacttatatagtacttatgatgtgtactttattatattatgtatatattatattgtgtaaccacttgatacattaacttatttaatcctcccaaccacactctatgaaatatataccatcttaatctttctttcgttgatgaagaaactggggcacatagagattttggtacttgctcagtaagtagcacaatcaggatttgaacccagataagttggctcttaaccaatacacagatctgcctcttttgtgatttaatcaaaataaactctaaataaagacattacaataaagacattaattagctgctaatcagctaattaagttaaaaatgtaaaaagtgctaattgaacataaaggagagtgacaaaagtgtgaaatgttcaggattatctaatataataaaaagcttatcaaaggtaaaaaagttttcattggaaaagattcatgaacaagcattctagaaattaagaaatggtaaatggccaataagcatgttgtaaatatttcaatcatagtcttttggttttcagtgctatctatagactgacaccttccttatgtatatgctcaggcctaaacacatgaactccagtcccccgtagtcaatggccttctaaaaatatcttaggcaatccagaaccaacaaattttttttcttcctacaccaagtgtccctcccttagaccagaagcttaggagtcaagcatccttctttcattctctacatccctacatctgttccatcaccaaatcctctatgaacaatactttccagactcacgtcaatgaggcttctgccttgggtctgcttcatttgtgcttctcccagtgatctgcaaatctcaactcagataaaacctcatcagagatgccttccctgcctatcgcatctaacatgctaactttgctccactccctccctcatcactctcaatgcccttatattagaaatgcttctttttttctcattaaatgttagtagactttatttttaagagcagctttaggttcacagcaacatcgggcagaaggtgcagagttcccatttatccttgcctccacacgtgtatacccttacccattatcatcctcttccacagagtggacctccactgacatgtttttattacccaaagtccatagtatacactaagattcgctcttggtgttgtacatcctatggctttaggctaatatataatgacatgtacttaccattatagtgtcatatgaagtagcttcactgctctgaaaagcctccgtgttccatctattcattcatacagccctcccccaacccctggcaaactctgatcactttttatcgtctctatagttttgcctttatctttttttgtctttcatctcacccctcttaataaaaaccattttaatttgttcattactatattcccaggttatggaatagtgctaggcatataatagatgacttttaaatagctgctgagttaatgaattattatatatatacacacacatacattatatcagtcatatgtaattatatacaaattatatgacatgtagatatataatatatttaatgatatacttgtattattattatatatgtatatatagatatatataggcattatataaaatactcattttgatggggatactgggaagtggaccactcatatcttagtgatggtagtataaattcaatgttctggaaaacaattagtcaactaatatctgaaatagtagagcattcatcaacgtttacccgataactctaaaaagtgtccctaaagatgcatcattctgtatccatcaatgtcagctttgttaagtgaatgttccacatctataaaaatagtacatgcaattatttgaaaagttatgctaccaaaaatactgactggcatatatagtaaagcaaataaagtttactaaataatatgtaagtattcatcttaatgtttttcttaattatgtgcacatatatttgtatagaaaaaagacaggaaagattatctataataattttaccatggctatctctgggtagtgtaattatggatcattgttttcttcatttgttttataatctttaaagtttatatcataaacatatttgtacttaggaaaatacagatagtacttttaaaagagttctgtttagttctccaagaactaaattttatcatttgtttaataagtatttcatgagcaatactaaactctcaaaatttgttaagtgctctgaagtttacaaagataaataaaaagcatatctgctctcaaatggtttatgttatcattaccttggtttatcatgggacaaagcaataattagacttaaatttaaaatttaatggggttttgggagatgaactatggtcttgaaaacaaaagggacatgtatgaaaccacaggtttctatctactattcattgagacgttgcttagccttttctaaactcagtttttatatctgtgaaataagaacattgagagaaacgaatgataaaatgaatgtactctaaagtagtatttcagatttcatttgataatacctccaagcaattaatctcacttatgttaaaaatatttttcacatttttttgtaatttatttgtaaatagaaaatatgttcgggattctaacaattgttgggataatgacagaaataattttctctgcagatctttcccccatcaactcatccatctttcccccatcaactcatccatctttccaaccattgattcatccatccattcatccagtttttataggatctttcctagacaaagcactgtgttgggcaccatggtatctctttaattacttttctcctttaacagtcctttaagactatgtatacattagaaaataattaatctggtatggtcagctatctatatgaccattttgagtcagctacatagctgatatgaatgaacttgatgaactccaatattaagcaggccaaaattaagatgctcagtgaagtttcagcagcatcacttgaagaaaggaaagtcagtgccttcctgtgttgggctgtggcccaaacacacaaggagtgtaagtttaaaaggcattctcaaactggaacacatccaaatcagttaacaaggctagaagatggttgagaaaacatactatatggaaactagttggagagaacagagatgtttaacctgaaatggggaaatttagtggaaaggaaggcaaatgcttaaaaatacctgaggttctagcccacgaatggtaccagaggcttgctctcagggattagaggtaaggttctaaggagttcagtgttgttagcatgaccaaccatatgcactttttgcccaagatagtcccagtttatgcctgctgcatgcagctcagttcactcctattaattacttagagtgccccatttcactcagaatgtctcaatgtgaacaaaaggttatatttgccctaagttttgtagaacccatacaattctttgttctacatcagaaagagctttccaatgataaagactattcaataatgtgatgggacaacttgccaagtgactattttcctgtcactggtaaggcacaagcagagacctggggtcacctgtctgggatgttctaggtaaggattccttatttggtgagaggataaagttggtgacttttaagttttctgccttctgattttaagattctgttgttttgtttttgaatattctatggtcaaatatcagttccatgacatacctacgaaaacacaatttttaaaatatactctttctctcgctaacatgaagacttctccattttacatttcattgaatttctgtggatgttgactaattctggagatgtggcaaattcatactagtagttctgtgtgtgataccttgtggaatgatgggaatccctgctatgataaagaaataagaccgggaggtactgtttaagaatatgacctggacagaaaataaatccaacatttattgaaatttgtttatttaatattgtaaatggtttgcttttatatagatttaatatatttaatagttattctatattataaatcattcactatagcaggctgtttcagggtgtaaaattaagagcgcactgcctttgaacttaaacggcccatgttagaatcctcagtgtgccagttacatcagttctgcgatttgaaatgaaatatttaacttctctctgagcctcaccttattccgtatatcctacaaagagaaaacactacaattttggagtgtaattctgaggattagaaataattatgttaaataaccttgtacacagtatgctttcaaaaagttcgctctggtgaaagactgttttgtgaacatgaaatctattttaacctacttgtcactatttaatgctgctctgtttgtgcatccttgtgttcaaggttgactgtccatttgttagcacatctgcatattcctcataattaatatctttttaaatgacatatggtttagtgactggaaatcgagtcttgccttctgttttcaatttgttcatgactcaatgactcaatatatgtgtctgaactttaattttccattctggaaagtagaatttaaaacccttgctcatatgtagctatttcggaaaatgatgaagaaatgtgtaatccaaggattttgaatatgtgccaggctattcagcgatgcagcatataggtaaaaggccgcagtttctctaatgttaacagagaagcctaaatgagaatgccaaaaatgtaatccctgaagtgaggggataatttggggtaggctagagtcagattcctagtgaattagcaagaagcaccacatctaaatggaatgagcacaggaagagttggtgggagccctagggaatgaggctgagaacatcattaacctggatgaacaactgatagtacccccagggcagtgcttctgcaagccagggatctctgaaagacaaggcccagtgcacccctggaagtgagtttctaacttccgagtcccccgtagcatttatacctcttttgtgctgagtactctttttttggtgatacagttatttgagtcaggtctaatctgttaaacataaagtagattatttgattccgccttctacctattctgccctttccctgcctctaacaagaaccttgtgcagagtggtattcagtgtcttgtattatagaattgaatttgatacaaaatattacaggcttatttgatattttaatgcagcattttatttcactattttgaaatgcacacacacaggcaaaaaacaaaacacacctcaaaagtaacatgttggtgggatgtcctgagaaagaattcagtgcatatggaaagcacagtgaattcattttctccctaaaatattcttcttcttgtccccacagacttggtagccaccaactacgtttgtaaagcctctgtttttgcctttgagagctcactcccagagttttataaatctgcagggagcaaaggtttaggacatgtgtaaataaatcattttatattttttcgtttgttttattttgttttgttttcttagagaagtttaggacatgtataagtcattgtctatttggtgttttgttttcttttgtttttcatatagatgagagtccagtggcgtatatcatttttaaagtttaataaaattatacattcaaaagattataccatctcaattattccaatctgtgatttaatttattgcttaatgttttgtatgaatttgattttctgaagcaggttaaatttgaaattttattaaaaacccacttcctttgagtttatagattgggatagctgttttatctagtcgctgtgtagaattagtatttactggacaagatgtgttgattcaggaggttgtcttggagtgtttgccccgtgagggtcatattaaacttgagagaagttctttgagcaacagagcatcttggagacaatatatcaagctgatggatacagggctcttctgttaagaaaccagcagtggaattatggctggctcccagttattgctttggtgctaaggagcctctaaggattaaatctaggataaaaggggttaaacagaggggaaaggaaggtttccagaattcagtgttactggaagcatacagaatgagtagttatatacaaataatttaagatgaccattctgtttggaaatatttcacaatttaatatattcaaagtgtaccaatttagtggagcatattgttttgttattactcagaagagaattcgtgacatcttattattattataaagcctactttggggcacttcttcctactgtcttaatagaaaggtaatgtagtttttaacacataaggggttttgtgtgcatattaaaaactaattttttcagggctaatgacttgaaattcagaatttggattttcaattacattatactccttgatgtagaaaaattagacaaaaataatcaaaagagagacatggttttatatgttatacattgtatgcattttgcactttattttttgcctgtgttttcacagtgctcttttttctatgtatgcacttattataaatcaattaaagtatatatgtcaaataaattatgattgttaaaaaccatttgtgttcatagataaaaatatcaattaaaaagcctttagcaatgaatgtccttcaaaccaaaaatgtgaaggtaagaagtggatagttggccctggacagcaatcttcttgcactttctagtcatgccacacttttactaattgagagaattatttcatatcatttcctctttcttcaagcctccatttcatccacccaatttgtcactgagcctttgcttttattttgctcactaagaaactgcgcatcatcaaaggagatctttgctattattccatcactgaatctactcactgctctacatcttcatctgtgcattcacttttgcacaatgggagaactatccctgctctgtttggcagccagtgtgcactgactctcagttgattcaaatgtgcactggctcacctctctcttcccacactaggactttgctctggcaattctttcttttacggtatcatttcccctaatctgtgttagattcttccaacaaacatgcctatatgctgcaacatcttccagtctttagaaaaccttcctttgatatcatgagcttttctagctgctgccccattttctaatcccttttagaataaattccctctaagtgttgtctaagctcactgtatctgccctttaccccctcgttgtcttcacaaccttagctcagactgctatgcccagcactgcactgcatctgctctttgcaaagttatcaaatatctgcacttggccaaatgcaaagtttcaactcccagtcttcttcctccttaaactctcagccgagttgatacagctgatacgttcttcctttttcatgtgccttctttctttactcggcttccagtctgcaccttctcagtttttctcctacctcactgaccattccttctcagtatcctttcctagagaggcctcctcctgacctcaacattttggtggattccagggcttggttctcagacctcttctatactcattctatcaacactcacttcctagtttatttcaccatctcagcctttaaagatcacatatatgctgacctacaactcctatgaaggctacaactcctatgaagacttttcctctccctctcctccttagtccgtgttagccacactgttccttaaacacaaccagaatgttttcctccttactgcctttgaatgtactgctatctctggctggattactcttcctccagacattcggatggctacctccctcatgccagtgaagtctctgttcaaatatcactgaattgcattttcttcctataatcttcccatcgaattgaagttgttacctagtaactaaaactgcccaattctttttaccttctctttccttacactgctttatttttctacaaagcacttatggccacctggtattattgtatacacagtattcatttgtttaccacctgctccctccacttgaatgtaagctacctaggggcaggagtggtgtctattttattcagtgctgttcttcttccacatgaagagtactgcttagcacagagtggagccttaataaatgtttattgaacaaatgaatgaattattaatgaactcaaacccattacagcagattgatgaaacatgtaatctaattcttctgttctcatcactggtcattcattagcctcattgttcacagacagcttcttctgaattggagagtatgtaaaattgacacactacacaaggttatgtataaaataaagttgaaaatggaccctgatatttcatttgttctcattattttgatcacttctccttcttcaccaatggcctctggtaatttgtggtcattaggaacctatattacaataatcagaatgttcccaacaaagtatattatactagcaattaaattatgctaaagaaagttcaggtcagtccaatgtaataatagtaataatagttagtgactaataattaccagggtctaaaatcaggtgctttatttatatgatctctgaacttcacaacaattctataaaggaaaaatattatacctactttagagatcagaaaatataggctcggagtcattaggtcattttcctaaaggcagagttttgctgaatttgctttcaagtttctgaatagctttggaacaaactgatatgatttggaacaagctgatatgacaggctcatttgagttataccagttggaaaaaattaattaaataaccagagtcatcttatcaactttttttagtagaataggctttagttttacacattcctgttaggccttctagaaccattcaaagagatttccctggtagattgtaccaagcaggtatgttgaagtcagaacagatttgccggagactcaactagactagaaaaagtggtatgcatgttccaacttgcaaaattgagtaagggcaggagaagggataactctgagaagggtaattgtataaaacacatagggaaaaaagtttactttttatattttcatgggtgagcattaaggctggaatacactgtattcagccattcatgtttatttatcattccagaaaaatacaattttagctaacttcccttcctccaaaaaaaaaaagaaaggaaaagaaagccattgtgttcacatgtagtggtgtgattaaggcagcaatggatgatatcggggggaagaatatgagatctggactgcttcagtgttcaattgtttggtctgttgaacaaagagttaaatgaaaaaggtactttaatatttgcttcactaaattccctccatgttttcaattagataaacagaagtacaggtgggaatgtgctgcatattcatttgtcttgctgtttgggggccggcttttaagactgaaatactaatgtaattgtgttgaaatgaacaataaggaagtacaggagttcaggaatgaaaatgttaaattaaatggaccatgtttaacattgttgttgatcctgaggaacagtttttccagtatatggagcatttcgattccatccagcatatgttctccacagttttctctgctctaattcatctgtgtttttcgacagctccagatggcgtgctgcctcccaggctttcatctgccactccaaccagtcttcaggttgtctggtctacaccagctcgtaataacgctcctggctctcccagataccaactccagatgaggtctggcgactccacccatggatttctagagtgagcattctactttgtccattctatcagctgggttatacaatatagacataacatttttgaagagtaggtcagttctcatttgcaaaaaatataggttaccttttaaaagtacaaaaaaaccccaaacaattagaggataatcatttgctttgcaaaaatatctatttttcatttatgtagcatttaaagtaggatttcttcccactgaaacttttcatgagcacatgcattacataaagcaatgaaactaacaaaatgatgtctgaactgtcgctaacaaattataatacctattctacaaatccacatggcagtcagtctcaatactactaggatttacatctcgtataaacacaagattacagactcagccaatggctacttattttaaaagagatctcatttgatggcagaaaattacaatacttaaatgtatgttgacatcctctaaaatttttttgtagtaagaaatttacttgcttttatttctttgaatgtcgaaaacttcctaattgacatttatttcccatacaggttattttccaatccttctgcatcgttaagctatgaagtgagtgatctccaaccgtacacagagtatatgtttcggttggttgcctccaatggatttggcagtgcacatagttcttggattccattcatgaccgcagaggacagtaagtggtctgaacaatacacagccaaatgtcttctacatagggagcttaaaatgtcttcaattttttccaaagcaaagaaatgagcctcccttatttacttgttgtttagtgacaataaccttttctagggcaagagagtgagcaaaggtggtcagtctctccagaaagaagaataatgtggtcttggagggttggagggttaggcctacagacaggacaaagtaattcactataaattatgatatggccccattctatccttcagggtacatcttagcgccctgcaagagaaaggttgtcatcttctgctttatgactgaatgttctctgtttcggagaaattctggcaggcagaagaaaatgaaatatggaccttacttcatgaggctgcttacatatacttgttcctggaaacaggtttcattttcctgcttctactcataccccaaagacagccttcagcatagagaagtataatctgatagcagtatattacaaaaggtggattaagatttctttattcaaccaataaagagaattttctagttgttcactaaaaagttatttttgcatatatttgctagattatatttgggaataaatacatgactataacatttggttttatacaaattacctctataaaagcatatatatgaaagtagaggggtttttaaagaaaagttagaaattaaatcaagctacacagagtgaataaggacattgtatctttgaacagttaggttttttgagttaatcttgtgaagtcttttaatcataggcttcttaggcaatgttctctgctggcccattgccatgctggctctatatccaatgagaacgttaagtgactttcaaaagcctagatattaacacaaaagtatggtatttgcaacaatatcaattgtttattaaatgtattgttttatttctataatacctttaattgcattattttagtgaagataagacatcaaattagacattatcagtacaatctatcttgtttaaagttgactttatttttacaaaaaaaagccacctttatgagcaataatgtatgttacttaattcatttcttccaattcgtaattactccctgggagaaagttagctactttgcaaggggacactcagtgtttttgttctcaagggtatcatttagtaaattatcagcacagtacgataaatggcacccaaagtccagaaagcattaattcaccaccttttaggaggaacattacatacactctggggaatctggacaccatgatcaccagatttatggactgaagacttcacactcaaaatagatttttgaagaaacatttgaaacaactgaagatagatttgtaatctccttcttatatatagcagcatgcttgatggcactaaataaagattagccaaaaataattattcaacccactgcagaggtgatggctcaatagaatgcttggaagaagggagaaagcattttttttttggcacagcattctttattctcctagagaaagggcaacactcaaacttcctcagcggtaatctccccacaattttcactgaatgagggccatgacctgccatctataggcagggaggtagcacataaataagcaaaagtccaaaatattgtaaaataccaattagcatagcatcctttgttgagcaaacttacctttggtctcctttttactataaaacaagccttatagaccacacatacacatcgttagaattttcatacccagagaccctccattgttgtggtatttagggcttgagtttaaagtgagtggtattaacccttcattttccttaagtaagaattagtaacacttgaataaatagcaggtatcaactcataaccattatttgtgtttaaatccgttccccaaaatgaatgaactcttccttcctctgctttgtgtatacactgtgaagtcacatacatagcaaagaactggaaggaggccatgtgtacctgcaggttacgttagcagtgcacctgagacatggtgacagggtactgtatattttagatgtcagtggagatggatgccatctctgaaaggatatgcaattgagttgacaaagactgagtgattggcattgggcacaagcagtttttctgtcaaggctacaaagcattgcttataaaaccacccatgttgacagctccatgccagaatcacacttcttacttgatcctgaccagcacctcctgctcaccaaagtgcaattttctttctctttctttcttctttctttgtttctttctttcccctctctctctttcactttctttctttctcactctctttctctttctctctctttctttctttctctttctttcttttcttcctttccttcattttttgagacagcgtttcactctatcgcccaggctggagtgcagtggcaccatgtcagctcactgcaacctctgtctcctgggttcaagcaattcttctgccttagcctcccaagtagctgggattacagatgcccaccaccacacccagctaatttttttaatatttttattagagatgggtttcaccatgttggccaggctggtctcgaactcctgacctcaggtgatccagccgcctcagcctcccaaagtgctgggattactggtgtgagccacctcacccaacccaaagtgcaattttcaatgtagaaatttcacatatcgtcttacagaacgaaacagagaagtcgcctcgtgcccacatttaaattccataccatcaacaggcacctttctgcatcagccacagcctcacagctttccagtgccaaaatgggtcaccaatggcaatatttttagtgtgacatttcaagacagtgattttcagcaagcctgtgacacaggtgaaaccacaaagagaaatctaggcaggcaatgagctacagccagagaagcaaatgcatgggtgcagagaagttatcatggacagggaaacaggatgtgaagaattttaatagatttttttttcaaataatttgtcatttacaccagtgtgccaccaatatccagttccatgcatttttaaaaatctagtgtgctgatgccaaataatcataatgcacatttcctatgaatattttaaatcctgttaaatgtgtgttaataaaagatgtttgttccagccaatttggtcagtgtagtgtttaactggttgcaaccagataaatacaaacaacacattattttttaaatgtgctgctggcagtccaagcacctggcatgtccacagcttgcaaaaatgtcctaagattatgttaggcttgggagcatgtgattaataaaatgaaggcacttgcctagcagctgaaaatgttgatatcttgaaaacaaagataaccatcactcctgattatatgattgttccttctctctcgtatgtttgcaattgttttctgtatagtacatgcatgtagaaattagagttggcagggagggcaagtttttcaaacctcagcttaaatgtggatgtattcttttgcctaccgaaatcctgccttgtgttaactatgaattaacctactttttcttaaaattgtggattccccagcccaaaaaagttagataatctgtttctcttaagatttcccaggaaataagattgaaatatggaatatctaatttcagtcattttaatgacaaacatatatggcatacacaagcaattagatcaactaatgaaattgaaatcattttctaaaaatcacttccctaccctcaaaaaaaaaaaccccaaacttgaattcactttagattttaacaatttagttgtcatatatttaaaaatgtttgatcgtttcccaaatttgtagtttaaaattccatatttatatttttaaccactagtctaagaggcactactgcataaaacctgtagaattcgaacagtttattctgtaggtttacttagacaacttttcatttgttcattattttgatgacacagtgatattttaagtacagttatatgctgcacaacatttcagttgatgatgaaccacatatatgacggtggacccataagatgatgatatcatatttttactgtaccttttctgtgttgagatacacacttatcattgtgtgacaaatgcctacagtattcagtacagtaacatgctgtacaggtttgtagcctaggagcaacaggctataccacacaaactagctgtgtagtgggctataccatctaggtttgtgtaagaacactctaggatgtttgtacaacaatgaaatcgcctaatggtgcatctgtcagaatgtattcctgtcattaggtgacacaagactgtaccattgccatgctatatttgctcattgcattacatcttgttattttttcacatttataattgcactgtgaacagaggagagggcaatgaaggaaattgtcttactgcctgggtcctgctttacttttcccctcagcaaccttcatccatccttcagatactcacagtaatttacaaaggaacagaggttcttctggagtaagacagaaaggcaatgtgaggtcaattgaaatctagatctaacagaacatgcttcttcctcttttgttgcctgacataattctacacattcatcaagccccagctcaagtgtcacttcctctgtgaagttttccttcttgttgctcccttagaattttggtttgtgtttactagtgaatcatcaatatccccttctgaattgtaacgtctcaagacctagggatctgtctcaactatctttctatcaccagtgtctggcgaagggtctgatatagagtaggtgccccaaaattcttactcaaagtactgattaaaagcagagtttgattgaagtaaatccacaaaaactcaatcaagcaaacatttaccgtgtacctactgtgtaccagggactaaaagagatatgaaagttgcaaggatggatatgatactgtttttcccttgagatttcctctgtctggcaaggagcacacacagtaaaaccatagttagagtgaaagagctgagttgtccatgagagcaagctcagaggaagggcatggcccctcaacatgagggccaggaaagcctacccagagaagaccaggagaggaattggaaatgatttatatttggagtgcactttaatatcaaagttcaaatttacaccatctccacttgttcagggtaaggctggaaagcaattgctgtaagagagcactgacatatgagacctgaagagggactctcaggttgtcctgtcggtcgttccagcctctgagtatgaggcgaggagggtggggacaagaggtgaatgtaagagagggacatcccaaaagtgattctcatttttttaccttggtcagaggcaggcttctggctgtccctctgattcaatattggctgctgtcttggctaggttaacgaatgttctagttagagaggcttctgccagccccaaatcatgtgctattcggaatgaaggggagggatgtgtagaaagaattctaaaacaaaaccatttttcctgtttttattctcacaacctgtaataagagtaaaatactctgagaccgtgtaacagaagaggaaggaaacatgtggtataaaatttgataaattgatcaagataattctagagtaggacttccgaatcatttaagtgcacatatgcccttaagattactgaaattttaaaactaatattgcatgacaaacatcttatgtttagggcattttagaatttaaagtttcacttgcatccttaaaatcattctacgcaacacaaggaaaatcggaatatttttaaatgagagtggaacatatttatatgagtacattttatttaatgaagaaagaggaactacaagtttcagtagtgctacacaactattttgctttctccattccaaatatttttccagttgccttaagtactaacctctgattgctgacatgtttttcctttcaaacagtaattcaggtatctattttgcatagaacagaagacccatgatcaaaaataacatttataatcttctgattttgagagcaaaatggttctgcatgttttcactacatactttgttttctgttgcatagattttctccacaaattcctgaattttcagaattaacaaattcaaatatttacaattatttttatattttatttttataatgtaagatcaaaaggaacttattcaagccaaaaatgaccaatacggaatcctttgaaaggatggattgattaatcaaaaattctatccaccttgcctcaatttcccacttaagctctcgaatctcccctgggcacttaaagcacactcctcttccaaatatagagtgcttgtaatgtctgtgtttcttacagctgaagactgcaggtgaaagtaatgaaaaatcaagttttttatgtttactttaagaaattaatgaaaaataattttatcatagctgccttattatcactacttaaattttattgagggtgtattatatgcaagacactttagcaggaaaagtatatcctctcattatccagaaatgctatctgctggccttccactatttttaaaaactattcttgttctttagctttgaaaaagttaaattgtcaatatttgaaaactctcagtggactatgtgagatcattcaaagataattgccacaggttgatatttaatggcatgagtttagttttaattctcaaatcttaaattcttagagagtcaagtatctaaaaactgctggttattaacaaaaagatggatgtttaccataatcattttctatagcattttctatagcacctgcctataaaagaacattctgcaatgctaaaacaatacatagattcatttaatcttgttgtcttcctcattttgataatgtacctgtaaacagagttgatttgctatatttggaataattcagataagttttgcccaaatataaggagtgaatgtgatgacctttaggttttttaggatgttttcctgacttcatgaattctcacatcaatgcattttattttctgcaccaaattatcgcagatgcatctactacgattcaccccacaatatgccccagctctagaggttgaaacattctttctaaacaatactctcctgatatcaggagaaatagagaaaaatagttcccgaatattggttctcctatttgcaaactatcaaataatgtccttccaattccaacagccttttagccttcagaggtttctttcattaaataatgttacttatgttatacagcccatttccttttttatcagagtcaggctgaaagttcatttttctgcaaaactgcagtgcccattcttaatttttgttttgagaaataactgttgtaccctctttattatcacaagattaataatatttctttattttattgctcctcttacatttggatcttttattatgagctgtcaaaaattcttttgggaagtagttggggtataaataataaatcgataaaagaattcatgattaaagacaagatagaatccattattctgttaacatatcagtagtgaataacaaaaggctacattgacaattagcatgcaatatattgctttatataattatacatccatatatttgccactttgatttttaattcactggtaaatttaggggatactcatttatggagttaatattaccaaaaagagtttttaaactgagcgaggctttaattagaatggtaaaatattgcttcagggcaacaatgagaatgtaacaagaaaactgactgatcagtcatgggtaactcgaatagcaaacaagtagagaagactcacaaaaccactgaaagttatatacacactcaagttgtgagtcattcaaactgggtattcatacacatgtatacaaatacaaacaagtgtgtgcgcacacaccctttccaatatacacacctgaatataaaactaaataagcagattcctctgttaacaattttattactctattttaggctggggctgaacttttgaagctgatgagcaaaatagtttcccataaaagataatttcatttgccaaaatgaaactactttccgttattaatgttgcaatgaaatggtttgaaatatgagtctgtgatctggacagaaaggatgctcctgttcccagctccaagagggagttctctaaacaattacacccacggagagcgctgtaaggttgtattttcatcaccggccagctgagctgtgtgcctgtcatactcccagtctcccctccagtgacagccgcattgacaacatgttatactccacattgattttacagttaaggagctgattgtgatatatagagattttaagaattcagctgagaggctgacttttgccttttatcattccattaaaattttataaccatctttttcatgtcatttcatccatgaattcttactttagaaagtgatagctactgctgtgagcataacttttctcatgttcagagctttttattgtattagcaaactaccccaattatagttattactcatgttttacataattgtggtggccctttcaaccatgcagttgcaggccagttgatttgtatatagaattagatgattcggcttatcattttaaagcactaaattgaaagagtgccaggagtcaggttttaacacttccctagccaaaggagctaattaagctgctttcagcttcctctccagaatcacacaagttaaaggacccttctgcaacaagagcagcgaatctactcagccagagcaggaagctaataaaatgtatgctggcttttaagggggaaacaaatcatgaaattgaaattgaacacctctcctttcccaagataagagatcatctttaagaaaaggctgtgtattgtgggggtttgaagtgcaagttcatctcattatcatggatgtttcacccataatactatcatcatatgcaggagaaataaaagccttatcccccaatcacagagaacaaactgcatcattgttgtttcttttccctgaagatgctcacagtttgatagttcacatatgaggaataattatgcaagacccagatgaaaaccctaataaaaaatattctgatttttaagtgtatattactctctttggggaagagagggtgagataaggttagacattaaagacttgaatctccaccattgattttacgaaacccaatctcaggggatttgggggtttttttagatttcaaaacaacattgatatcttacaagactcgtacttgcttttctctgggaaatagccaaatctagatgacaagcataaataagaaaggagctgtatccccattttgatataataattgctactgctactgtataccagagagcaaaagtaagaaatggcatagtggttttaagaaagctttaaaatgaaagctaacaagagactgaaacggaaagtgtgatttataccatgactgctggttttagggttttttttagggatttctcttcaaataggatacattaccaaattgtcagaaatagcttgatttcagagttagtgcactataacatcttttgcttcgaaaagtgattatgattctaccatcagtccagttggtgacaaatacgtggatcctgttgtgtgaaagtgtactcatataaccaactattattgcagtcactggccctgcaaagcagtggttgcatttaaaatttcaaccttctttgtaacactgaatcgcatacacacactcacaagatcaacgctgttttaaacaattactaaatccaagtatatcttttttaaagattttcaataaaatctaatgttcacagaaaaatctcataaatgtcaaaattgctgtgggcagaaaaggggggatacagtattttcttgatctgttttagcaatttatagatttcaggccgtggtttataagaatgctaaatgttctggaattacagctgttactgatcagtgattgagccagatttgtgttattgcaccatgttcttgcttgtacctagagagcagtaaagcctcaatataataaaaagcacctgcattttaaatgaaatttcaattgaaaaacttaacagcccttcaaattgcagaatttaacgcagcccagtaaagcttaaataacactttgcccccgcaggctgaggggtttgcattcaaggtgacttgattgtgtcgcatggtgaaattatttacaattaaggaatttctctggagggctgcagaatatttgctgttccacaacacctatgcaggcatatggtgggcctttttcagtattcatggagcctcctgaacctttatgataattgaatcagttagagtgctgagtggagcaagcataaaacctgttaacctaaaggtcagatctgtgcattgtttatttatcagtaggtgaaagagctaaatcggcagcttctgtcacagccacagtaaaaaatcgcctataatattaacagggagtagataaattgcaaaacatggattagaatgataaacagaaccaagtataatatagaatatataatgagagatgctgaaggattttactgggctgtaaaatatgcaagtttgttatgatagtgttattgattataattagttactggggctctagaaaaaaatgtaggggaagctagaactttagtaacaactaccctcttgtatgtttattaaatttatttttttaaatcctcattttttaaccaatggcttgaataaaaagacatgattttgataaagctgtcttagagaggaaaatgatcattttagtttcataatattcaacaagtatttcacacgcaaaatttatgagcaaagcaatcacagtccttgtctttatggcacttatttatttacttattggcctttaccaagtgttcattttcatatccttgtagcagagctatcactcattttagctttgaggagaggtgggacatttccaagaggtctgactttctggatttattttactttacagaacctggacctgtagttcctccgattcttctggatgtgaagtcaagaatgatgttggtcacctggcagcatcctagaaaatccaatggggttattacccattataacatttatctacatggccgtctatacttgagaactcctggaaatgtcactaattgcacagtgatgcatttacacccatacactgcctataagtttcaggtagaagcctgcacttcaaaaggatgttccctttcaccagagtcccagactgtatggacactcccaggggcaccggaagggatcccaagtccagagctgttctctgatactccaacatctgtgattatatcttggcaaccccctacccaccccaatggcttggtggagaatttcacaattgagagaagagtcaaaggaaaggaagaagttactaccctggtgactctcccgaggagtcattccatgaggtttattgacaagacttctgctcttagcccatggacaaaatatgaatatcgggtactgatgagcactcttcatggaggcacaaacagcagtgcttgggtagaagttaccacaagaccctcacgacctgctggggtgcagccacctgtggtgacagtgctggaacccgatgcagtccaggtaagatactgactattctctctcctttgcagacttaggaatgtaccctggattgactctgtgttgaacagagccatctactgactaaacaaacgcatttgttgttttaggcattcactggagaaactgggttttggcctttggcccaaactatcttaaattcgatgtcagtttttcatttatccctgtatccccttaattatattgttgagatgcttccatttgcctcgcacacctgaaatattttgaatgccacaatgatgcttagcttaaccaccacgtcagatttaaatagatcagaaaatgagaagagatgggaaaataaggaggaatgaattagcatattaacaaaattttccattaccaatagtctggtattttttaataatcaaagaatcaaagtaatggggaaagaaataaaaatagcatattaacgggctatccagaaagtgttcaattattcacctcattctattgggaatgaactctagtggacaggataactaccattgttttggctggcatacaaacttcattcaagggaaattagtgtaaccaaacaggagggagttttgtagcttagaagcctcttttgtgtaaatacacacaggcttccatggattcagtcttgtactactgccaaaagcattggtacagtagcttgctcaccggagcacaaaacaaaggacatttgcataacagcaaagttcatctgctgaaattattacttggatctatgttgtgtgttctctctcccccaccaaaagcaaacactaggtgatgctaaacagtgtaaattgttggagaaatttaatttaacctacaaattaaaagctatttttaaaagtctttgttagttttaatatgaagctggtcaaagcaacacacatttttgatataaatatgtgtatagaattccattcattaaacactaatgggaaattaattttaagtacacgatatacgatgtttattgtatgaactgagcaatgtaaagaattgctcttgattcaaaataaaaacaaaaccaaaaacaaaacccaagcatagagttaataatcattccagaaatgactttttttttcaatcttgggggagttttgtaaaactttggtagcagtaccaatcactatgatgcaacaaaacaaacacagtctctttacaaaggcaacactacataatggacattgttctggattatttcgaataaaaatcttataactaggcgttactgattgtggccgatctgaaaaagagtaagtattttcaggccgggtgcggtggctcacgcctgtaatcccagtactttgggaggccgaggcaggcagatcatgaggtcaggagatcgagaccatcctggccaacacagtgaaaccccgtctctactaaaaatacaaaaaattagccaggcttggtggcgggcacctatagtcccagctactcgggaggctgaggcaggagaatggcgtgaacctgggaggcggagcttgcagtgagccgagattatgccactgcactccagcctgggcgacagagcgagactccatctcaaaagaaaaaaaaaataagtattttcagaggaggaactcagtgtacaattctgcttgattcagcatatataaacaataattaaaagtatcagcttgcctggctttttcttcacatttttaccctcttttgattttgtaatatcatccatgaattaaacaatatacatggcttgtcagcctgctagagaagtttagattagcgtggctagaaagctgaatctcataggcactcacctgaggccacaaggcattggtaaccccaagtcaggaatctcaatgtctctaagaaggtgtctgaaatatatgaacatggtacactagtaatattctaaaaattcacactttttattctcatcttataactaggaaataaaaagttatcaatagaatcagcaggaatattcaactgagtctagtatttaatgctatatactatttaaagagtattaagataacatatctgtccttcagtattattggctcacatgttcagaacgatcttaagactttaccgaagtggacgttctcgtgatatagcttagctggtaaacagaggtatatgacagctaaacaacgacttctctttgtaaaatatgagatttaaaagtccaaattgcaaatagaaaatattttatatgaaataacagaaggatagtcattaatgcattggttaagaaattaattcaactatttatcatagagggttgttccaggtattaggatggatgaaggaaattgacagtaatattaacagcagtaacaataataatttcagttctattgacatttacggaacatcagtacatgagtgaacatctttgtaagtgcctcttttaggcagtagggacacagaagagatcaagatgaagtccctaggctcatggcgattacattttagacagaatgcaaacaaataactatgtaatatacctggaagtaataaggacttgggggagaagaacaaattgagtgtagagaaatatggaatgccagctgatagggtgggggataatacaaggagcagagttggtatttcaccttagtgttactcattttgtgcaatgtggtttttttctccatacaatgccacctgtaagaattacagtccaatagggaaatcaagagagacaacacatacttaggctaactagaaaataaatgcaatgtaacatattagtaagtactaaaagaggtgatatgacttggtataaatatgagccttgagaaaggcaaattggagagcacagcagcatagatgaaataatatgcttaaaatcttatttgattacaagaaaaataaatatataatgtcaaagagttgtgtcacctgaataagtgaaagccatgcacttttatttaatatttaatcacctaagaaaatgtatttcattttataaggttggtaaaaatgctctaccaagacctaaaacagttcaatgaaactatagactaatttcatttatgagtacagattcaaaatttctaaataaaagattaccaaattgaattaagcagtatattaaaagaatgatatacaaggacaaattgatttcattttaaaaatgtaaggatggttcaacatcaaaaaatctatcaacatatgtcttacatcaaccaattaaagtagaaagcccatatggtttttttttatcaatagatgcagaaaaaaaggcatacaattaagaagttatttctaacaaaaagtcaaagtaaaatcagattaggaagaaggtacttaaatgggataaagtcaatgtataaactgctgtactgaagccttgaattgaggattgataagaaataacatgtataaataactaagttgcatgactatgatgcaccaaaaaaaagaaaaaaaaaacttcttttatgataacatcatgagcctgtaaaccttgatgcccctgtccactttttcacaggtgaagcagaataaaatagagtaatcctgcagctgtcagctcctcttatacagtagggtcctcactcagctcagacaggtgaagccaccagccttggcaggtgcgccacaaggaacagtgtcacccagaccacaaacatgtgtagcttccttccctctgctatgtacacttagggtcactcatttatgggtttgataataaagcaaagtaaaagaagttgagtcttaatcatcatcctcattgacttttaaagatgggccaatgtttgatgtctacttaaaataaaccacagacaaaaagtataaaacagaggaaataaaataataatgaaaatatattcactgagttcatgttatgttctagaaattgctttcatttaattcttactacaactgtgtcagatagatgctattgtcattcccattttacagacaggaaaactgagaatgagggattaagtaatctgcataagattacataaggagtaagagttggaattcacacccaggcaatagggttctggagcctatgttcttctctacttctttacactgcaacaaatggaaaaaaagtgcaatcttcctggatggaaggacttaactccataacaagacaatccttccaaagtcaacatataaactgaacatcattcaaatcagaatgccgatgttttttgtttgttttatttcaaactggataaaataattttttattttttattttactttaagttctgggatacatgtacagaacgtgcaggtttcttacataggtatacatgtgccatggtgatttgttgcacctatcaaaccctcatctaggttttaagccctgcatgcattagttatttgtcctaatgctctccctcccgttaccctccaccccttgacaggccccagtgtgtgatgttcccctccctgtgtccatgtgttctcattgttcaactcccacttacgagtgggaacatgtggtgtttggaacatgaggtgtttggttttctgttcctgtgttagtttactgagaatgatggcttcaaggatgaagctggataaaatgattttgaagtataaatagaagactaaatgattgaaaatattatagaaaattgtggaagaataatgaggtggtactttctgtagtatgtaaacttactttaaagccattgagttataataatatggtattggcatgaaaaagacaaatggtcattggaaccaactagagagtttaggtatagataacgagtatttgttgaaatgacttattgtaggtagaatctgcattttatttcattggtaaagaatggtttgctttaaaaaatgataccagcccgaccaactatcaatgtgtacggaaaaaacagatccctttatcatatcatattataaataaattcccataaattaaaaatgttaatgttaaaaaagtaaaaatcttagaaaaaaaggagaatttcatgtaatctaaatgtaggggagcactttctaaagaaaaaaagaaactcagtagcttaaaaaaaaaagatagctatatgtagctagaaacaatctgattgattttctaaggcataaacttcccccccacccaccaaaaaaagttaacatccaaaagatagatctggaaagtacatctgtaacacatactacagacaaatcaatttcaccttaatatgcataggccttctaataatttataatacaagatactttaatagaaaataatttaggtaagaggatatattaggttggtgcaaaagtaattacggtttttaccattaaaaataatgacaaaaaccacaattaatttttcattcatacctcacataaagtcaagggagtgaaaattaattaaagaaacaagtaatattagcaaaaacgaatatcagtaatttcaagagtttgtggaggcacagatcacggataatttcattgtttatgataaagtgaatttccccaactttttaagaaagtagtatatcaataatgattaaaattaaacatgcattttccttttggcatggcaatacttggtaatctttccaatatgaaataaacacaagagcacatattgcatacattttcaaattttatttttagcataaaataatgtcagtaggattaacaaataatttgttttcaaccatgaaaggaatattatgcaaccataaaaaataatagggtgtgtccataatcaattaagtctgaaaagcaagttccagcataagtggtagagaactttttttctgtgaaaagtttttaaaaaataaaagagaaagagagagagacctaggatatgcaggagtatatttgctttgcttgtacgagcatacaaaaagtatggaagaataaacttcagactattaagttttcacctgagtgaaataaaacagagccacaattaatgtttcttgtatttatatatttgtactctttctctgtctgattgaaaaaatacaaatagaatatttgaaattaaaaattaagattaatatttttaaaggaaaggaagacattgtgaaagacaactttatttcaacaaatatttattgcacatcttgttctgtatgaatttttcaggggagtccatcataagaggaattactacactgtacggagtcaaatattcccacatgatctttctttatggtacatttttatcttctattgacaaaatactcttagaattatgcaatcttatgtctacacacgatggcaaggattgtctcatcacattagacatgagggttccgaggcctggagatgttaaatgttttgcctaaagccacaccgctttgagacatttatcatctcttagtccattcttaacccatatatcaatctttataaatgctcttattcatgaagttcttcaaaatagtttgatggagttaaagaagtgaggaagttgcttactatgcttttgggtgttactcttttcaagcctgaagccaatcaactaacctgcatgtctaagtttctgcttaaaatggggaactttgaaggtgccatgattctttttagagagacttttcagggatgtaaaagagctgctgaaagtcaatcgttccttaaacacttaaccggcaatttagccgtcctattttctgaagacttacaataaacagaaaaaatggaaacctgaatcattaagaaccactcaaataaaagaagtcattgtgataggaaagccatctctgaaataaacattttatttccagtgcaaaactataattctatttaaaagttttaatgtaatattattgttttaaagaacacatttcttgcttattcaggccaataacatgttcttttgtctgaatttttagggatgcaacaatatttcataatctttcttatgtacaatggatatacaaaaggtcataggaaattaaacaaactgaaagttttaatctcatatattttgaccacatatacaataataaatgtggtcttaagcatagaaaagaatagaatacaatatttagttaactggctccttaaaattcttggacatgggcagggcgtggtggctcatgcccgtaatcccagtattttgggaggcaaaggcaggtggatcacctgaggtcaggagttcgagaccagcctggccaacatggcagaacccctctctactaaaactacaaaaattagccgggtgtggtagcacacgcgtatactcctagccactcagggggctgaagcaggagaatcgctcgaacccagaaggcagaggttgcagtgggctgaaatcgcaccgctgcactccaggctgggtgacagagtgagacgctgtcttaaaaaaaaagaaaaaacttgaacacattgattaattgattgattgattgattgagatggagtttcactcttgttgcccaggctggagttcaatggtgcaatctctgctcagtgcagcctccgcctccctggttcaagcaactctcctgcctcagcctcccaggtagctgggattacaggcacctgctaccacacccaggtgatttttggtatttttataccttatacaaacattaattcaagatggattaaagacttaaatgttagacctataaccataaaaaccctagaagaaaacctaggcaataccattcaggacataggcatgggcaaggactaagtattaatggtttaaagtgttgccaagctctgacctgaactctcaaagtattctggtctaagaggcaagaaagccgtattcttcagattagtcaggttgaatttagctgtgatagctcttctttttttcatttctgttacaaataccaggaagctctctgagtttgaccttgactcattttccgggtccacagacagcattgcacctccaaaacaaatagcgtcctatatctgtgctacaacctttgctagttttagggtgtttttaaaaatattccccacatccaggcaaatcctctatgtttataaggaacacatctaaaacttctcttcatcccagcctctcttcttagaactctccaaaaagtttttttaagattcacaatgatttcatcccctgtagtataatttggtagatattggcccattgttaattataaattaccaaagtaatcatcaagcaattgtccaactagcatgtggtgagagcccttttgtcaccaattattagtaagaatactctttaaaaaatctcaggtcatagtcttcctggatgaaaccttctccctttgatttaagatagaaaattatggtcagtccttctccattttaatttctatattgctcctctttggtttgcataggggtacaaatgtacatataaatatgtcaccttgtagaaacctgtctcttaaagtttcaaaataactgtatgctagggaaaaaaatataatctaacaaaacatgactctaattactaactgaactccacctctgtgcacatggtactaagtgaatgtagagtttatccctgctatgaagaagcttacaggctgggacatgagatatatatcctggcatttatataaagagcactagaaggtaccaataaaagagatgaaagaggataacatgtaaataaatgatttttgtcatggcctgtgcacattttttaggatctctttccccataagaacatgagtgtgttaccactatgctcctgtagagtttagccagaaaagaaaataaacttcagacattctagaattctactacaaaatgttgttctttcttctgatgctcaagtccacatgttagctaagcacaaacatctttggcttccctttttcaaagctttctatacattccttatccctgagaagaggatgtgctattaatgctttaattgctaagttatatataaataagattcaggaactcaattttgcatcttcggaaaatatgaataatgatttctctttcccttcctccaagaaaaagtgacttatttggcagtcacactaacagtgcaaagaaatgagttctgatgtttcatttagttgagttataaacatgaaaaccatcaaatcctatgcaaccctattgaagcatgtggatgtgtgaattttctccatgtgtttgctctgtgtccttcagaacacccacagtggcgatgaatcgctaaggtgtgtatcagtctgacagtcgtagaaagtggcaagactgaaagccaaacccaggaaacagcatttcatttagctcctggagtactgctaattgatctcaaacccttcattactgtctagtccaaaggcctcaggagaatgtagccatttagaaaatgacttaactgaaaacaagagcaaaattctaggcctcgtgaacttcaattgctctattcctgtatcgtcacactgattctaagtttatctttcatttcaggtcacttggaaacccccactcatccagaacggagacatacttagctatgagattcacatgcctgaccctcacatcactttaaccaatgtgacttccgcagtgttaagtcaaaaagttactcatctgattcctttcactaattattctgtcaccattgttgcttgctcagggggtaatgggtaccttggagggtgcacagagagtttacctacctatgttaccactcaccccaccgtacctcagaatgttggcccattgtctgtgattccactaagtgaatcatatgttgtgatttcttggcaaccaccatccaagccaaatggacctaatttgaggtaagagaaggtgactatgatttttatgttgctgtagtccttatctctctgagaagtagggaaatgaaggaggcttttattcctatatgaacatagaactaatttggcattgaatatcccctgactcataactttcatacactatcatactgtacacttcaacttattatggaaacatcaaagtttatcaatttgaagaactaaaaacccttgaaaccacaatcactattgtctaaggattcgctacataatccatcacttcattttcaacatatgcttttattatatgttaggcaaacctgatgtaggttctatatgatacatttgcacaaatgtacctcagaattctaaggctaacacagtaattctttggcatgttgttagcttatggaaacttgtgaggagtgtggtcagggagcccgatacgatgaaagaaaagagctgtgattcagaaatggttttgcaaccacccaaacttgatacttggccaagaatacaaagttgataatattatcatcgtttataaagtattgatagtcataggaaaccattaacttgataagctttgtgtatttctactttgtgcgaaactggcagtaaagatttggcacatctaacttagaagaaatctaaaatgctatcattctgggagataatagtaaaatgcgaatgtaactgattcttcaaaatattaaatatatggaatttggtccagaaaaaaaaacgttcatctgaaacaaaaccacgtaactgtaaacttaagatgttattctttatgcttccacgcatatatcacacgcacatgccacagaacagcctgagttttggtaatctcaatatgagttgagataatcctgatgttcctgcttgtcttttgctttagatatgagcttctgagacgtaaaatccagcagccacttgcatcaaatcccccagaagatttaaatcggtggcacaatatttattcaggaactcagtggctttatgaagataagggtcttagcaggtgagattacaaaaactataaaaacaaatgctggcatttagttctgggcatgttgaatagttcaaagtatctcagtgtcttcattgtgtgagcgtgttatcagttatgcaataaaacatgtttggttattatctgtggcattaatcacccagctgtaacagtcagcatgtttaatgttttccatcttaactgcatgcttaaaataagccttttgaagttgaacttgtagatgttcaagccttaacctattgcctttgtcacggctccatctagacataaaacgttatggaagaatttggaaatattgaacacatacaaaatggggaaaattcctgggcacttgtagaatgcttgctatttctagaaatggcttataaatgaattataatgacttataattgattgtaagttattgattcagtccgcaaaagaaaacattagtgaacaggattgggacttgaaagaattcaatctagagttcaaagacattcagtaaaggctaataggtgacagtagaaaagggtgctacatgggagagttaggagatctggttctgctttagcctgtgctggagaactagctttgtgactttaggccacaaagcttcactacttaaaaatcacttaacttctctgggcttcatttttgttgtccataaaatgaggtgattttatagaattaaatgacttctaaatcttcatgagttcaagcaatgtgattaaatttcagaaaacatgaacgttattttatgaaaactcctcgatcatatgtttcagtaacttttctatgtgggtcattatttttctagacccaccactgggtagctgtagtctgaaccctgtttaccattctagccttgtctcccatccctttcttaccaaggcctctgcattccagccacatttgtattgcattcagtacctccaacatacaacacttgctctttcagcttttccccatagttgccttttcctgttgcctgactagatcatctgccacgtcttagcctggaggtttcttcctctaggaggcctttcctgccaacactcttgctggtctgattcagctcctctgtaacatttccataggacatcccctaacatatcactattgtcattgtagtgtactggcctgactgcttgtctaaacaccacgttatattatcagatctaccataaggcaggggtgcggtcttcgtgactctgtcttcagttcctagcatggtgtctggcacataccagcacatagtgccctacacctgaatacttaaaaataggttagctcaatcaagaattaattcactgctctgtaccttaggaatattagctgtagtgttcttctctctggggaatggcaaaactaaggaaaattctcctgtcctcttaaaaagttgtggtgggaaaacatcctagttcttgtaagattctcagagagaggcatctcgtaaatctgatcaagcaacagaatgaactatatgaaactgccacttttataggtgaagattggtcaattactagcagatccatgttgcttatcctaaattataatgctcattatactattctcaactacttttaattcattatttacttaatttggcatccctatatgattatcacttcagtagaataaattcatttatttttgcttatttgtgcttactgtgtgctgaggcactgtgataaggaacaaaagataaatacatcttagcccttgacctcaaagaacttataatctagtggaggaacccttccccccgccccctccatagagagtgtgatataatatgtatttttatatattatatacattattaattatatataataatcaatatatattatatatttatatattgattattatatataattaataatatatataattaatatatatattaattgctgtcctcagagttatctacaaagtcaccaattctgcctaaagaaatcacttcaaatagtagcttcctgtgacctatgaactcttaagtgcttaaatataactatttcaaaaaataaatagaacttgactctttaacattactgaatctgagttttagccatgagctactcagcaaaaacaaagaataagtttccaaaagttaattttgtttctttatacaagaaatgaaaacttattaaataattaggaccaaggccatgaagttagttatgaatttttagtgattcctctaaggattcttaatgagaagttcaaatctaagatttcaggaaaaaataaagtgaatttccacaacttaaattgaaacatgaattgacataaacacacccatgacagctgcttccggaagggaagtgtgcagataacaaaattgtgttaaagggatattttgactagtttcataatgccaaatgtcatttttttccggtagtacttgcacagattttttttatttattaaaataacagctacaacttacattaagcttgtagaaaaaaaaaaagcatttcttcttaacattcagtgtaaatggcgtgagtctttataagaatctctttttctagccctctaccctttataagtccataaaaagctaggagtgcctttagcccaagggggagtgtcttgcaaatatgagagaaaaccaaaacttgatcccctggcgggcaggatatttttctctttaaaggaagtgattttgtttggttagatggtgccactggccaccttggcaacatccggggctccttgttcctgctggtcagctagtggtctgtcaaattgcagagggggatgaagctgagtgttcatcatgtgttggttcacccctgtgttactgttccttcatggcccttcctttgcctatatttgttttgctgatttatttgtttggccaggtatgttttcctgggtttttaattgaattctaatatctttgggaggattatgtaatttcctattctccccagattccaccatcccaatttccttcttaacttaacgtctgcataaataaaaggagcactgaagtgtttcttaccatcttgacttgaatatcaccatagttacatttagaatcagcttttaaatggcacttctcctgatataaaaagtaaaattaagattcactagacatctctttatgaatatatttgtgacagtaaatataagttgaagccaatttcctagttcaagtggtctattttggctaagtatgtgtttataacgcatagaaaagcaccaatttaatttaaaacatcattatatttggaacttcagatcattctagtagttattttttcttttatatctacatgtacaaaacagtctcaagtcaattatccagataatttaattctaacaaaaatactttttgctcttatgattatcttaggtaaggagtaatttttgtctaaattgcacagctagttgcctcattatcgaattttgctctgcctgtgtagacacgaattccgtataactacaggtttatactgcttgtcagtttctaacttttcttccttaataattccttgcaaagtgagcaagttatggttgttgggggaactataactttgggtttcctgacattttcatcacttagaaaatctggcgaacgtgctgttatcatctgaagctgccgaagtgagtcaggcagggtttaacaagagggcggcgacctccttcattttaagcatcaatctaccttcacaattttcagcacctaacaacactgccttggttcctaagtgatcagataaaactgctaagaatacaatgagcatgttctccttttcgttgtggatttaaagaagaacaagttataataaacaatagggttattttactattatagagaaaatattgactgtcagattataatttagatttataaattagctttcattaagtttatgaaggaatgtatgttctaattgctattccttttaattatttatacatttctcagagtatttttttttttttttgcaatgacaatttggatggagacctctatgtgattcctcgagaatccactaattgtattacatttaaattaaaacattcaaaattaacacattttcgtcttatttttcaaagaagggtaagacttaagatgtaaatgcttaagctaaatatatcataaattctaagtttaaatcttattgacatatattttcatatatatttttaaatctactaaaataaagatgtttcaagtcctaaaagaggatgccatttctgtgggggataatattcaaaagaacataacttttgttcctcttctttgtaatgagattaaatatgtatagatgacatctgcatctttgctagtatgaaagactgggtcagttccatgacacgtgtttctataatataaataatgtcagattgtagctattaagtgaagaagttaactttgtacatagaaagggcaagtgaaaggaaagcttctcccgtgactaccaagatgagatagatcctgttaatttattccttaatatgggaatgtgaataaaaattgagtctaagaatgaaagccaacttctgtcaacactagtatgccatctcatagccatgcacttaattcaaaaggagtaaacatgtctttcacattcaaattaaattggtcacagtgttttttcccattggatttttttttcaatgccttacatgccctacacgatgtccttttctgtgtcatcatattatgtgttacctccttgtattagcccattttgcaatgctctaaagaaacacctgagactggataatttataaagaaaagtttacttggctcatggttctgcaggctgtacaagaagcctggtgccagcgtcttcctctggtgaaggcttcagggagcttttacccgtggtggaaggtgaaaagggagcaggtatgtcacatggcaagagagggagcaagagggcgctgggaggaatgccatgctcttaaacaaccagctctcccctgagctaatattgtgagggctcactcactaccacagggatgacagcaagccattcataagggattcacccctatgatccaagcacatcccattagggcctacattcaacattggtgatcacatttcaacataagatttggaggggacaaatatccaaactatatcactcatgaaaaatgaacttctaaatccagaaggatgtgttttgtcacaggaggtttttttcccctagtgttttcttagaataaaaaagcagaaaaactactttcattggctgtatttctttctcatggtgatgacaaagtagaacaaagatggaaattactgcaaaattatcttaggtctgacaattctggtagtgtagatatagatagcaacagaaacataacagcttcaagtttcactcacaatctaaaatgtctcatattaaaaatattcaagtgtgatcaacattactcttcaatttttgaagcaaaaatcttcaatactatttttagaatcaacaaatagattttttaaagtgtctaccatcagctgaaaattttaatagctatagacttaagcaatggaaacaatattgcatttcatttttctttgtttgctattcccacaaaagatttgaagatgtaaggaaaagtatgatttatgagatttctcaaatccacacttgtgtgatggtgtactgaaaaatactttgggttgtggcagagatgaggaagagttagtggaagaagcaactaaataacctgcattttcagaagcgtgatttatattggtgacaatattaacacatgaattctgttaggacatcaataaagttgacacatttttaattctgatgaaaataaccccaggcattctgcagctgccctgaagaattttggtttcccacaatatatcagtcccttccaagatacaagccttcacatattttgccctggacaaatgtcttcactggataaaataccacttcttatcaaaacctgccccaaatgttacctcctccgtgaagacttcccagctggatatggttaaattagatgcttcatctgatgcgtgttcaaagaataaggaataaatgaataaattagatgttctcatttaaaaacatatttctgtaaaattttatatacattatggctccaggtggacagataacaattttattatttttaacacctggcatattggtaatatccaataaatattaaatgaatgaacaaatgaatgagtgaagtgatgtattaaatatgaaaaagcaatataatttgttttcaatatatttttaaaagcactttgctaagtttcagcagagatattctttctattggacaggtagatttttatctcactaacctaaaaaattatataagtgacctgaaatttttgagactgagtgcttaaataactatgaaacatctattcattcatttataaaattatctattcagtaaataaacaaattaaaactgcatcatttaaacataatctagttttctaattcattggagtaataacacctgaaccttgaaatgaatattgttccacaagtaagattttaacacatattattttttatgaggaaaattaccatagtcatgtctataccataataaagtttacaatttgctgtttggggagtggaggagggagagaccggaggatggtctcaagcaaatgggggaaaaactattgtaatagtccaagtattcctaaatggacccaaaaacaattggttttactggctacatcatagactcaatataagtattcacttactttgaatacttatattgcaaaagttttttcctacagagtttaaaatggacatttttcaagacatgcctagagaacacactttgtatttagagaagaaattgattgatacacataagttttgtcataagtatatgatgttaattgatctagcatttttgttttaaaatgtattcttttatcatttattaaatggaatgtcccatttaatatcaacaatcaacacgtaagtccatttgaaaaacagtatacatagagtgaatggaaaaccacttcaagccaactaatacattctttttttgatatgaagtggtgaaatgtgaatcaacatatatatgtagacaagccataggtatatattcttactaaatacagattggaattcagatgaaatgaaaacagtatattttagtatttaagaggattcaggatcttgtttcctcggccaggcgcggtgactcacgcctgtacagaatcccagcagtgggaggccgaggtgggtggatcatgaggtcagaagatcgagaccatcctggctaacacgatgaaaccccgtctctactaaaaaaaaaaaaaaaaaagctaggagtggtggctgacacctgtagtcccagttactctcaaggctgaggcaggagaatggcgtgaacccgggaggcggagtttgcagtgagctgagatcgcgccactgcactccagcctgggcacagagcgagactccgtctcaaaaaaataaataaataaaaaaaaaataaaaaataaaaaaaaaatcttgtttccttaaaaatttaacttaacaatgaaagttaaagtacaaaagacaaatgtacggcctcaaatgaaatatctactgatttctcaattaaatttttaaaaagtggaaatagtgtaatattggaaatgaataaaccctatgtccagctaccccattaactagttgtgcaaacttacacaaatccacttgtttctcagggtctcagggttttttgtttaatctgtatgatgtagcacacactttattatttgtagcagataaactctaaagccatctcttactctaaaattttagaaccaccttgaaaacaggcatgcaattgtgtgtatctatgtggcctgagttttgtagacgtaaattgtgtatttcgccataactaaattattgtgaaatctcttaaagtattataaaaactaaagccctatagaatttatttacaatcaaccattttagcgccacctgatattgttaattccacatgtaggaaagaaccacaaacatggtatcactttaaatccataaagattattaattgtataatagcatagacatgtggaagaaaaatttacatattataggagaggaggctaggtatccagactctagctacatttcttttaagtcattttatgaagtaaaatataattataagtattttacccagggagagagctaatgaagccaaggtcgctggttcaattcccttgtgagccattagcttcatttcattccattgtcataggcttgctaccctcttaaccccgactcatcatccttcatattcatactattggttgcaaaggaaatttggccagactgtttgaatgtgtaagcaaaaatctattccctctgctagaaaaataacgcaaagttcaagccttagtgatatgacatcatccaagtatggacagaacagattatcattatgattgttattattactattattattatcatcactattatgttggcagtatagcatcatggttaaaagagcaggctctgaaatcagactgcctatatttgaatctcagtcctcctacttattatctcaatgacttggacaagttatttatctctctgagccttgtttttcttattttcaaaataggtattataatagcaccttatagagttttgtgaggaatgaatgggttaacatctgtagaaaatgcctgacagctattaagtaactattattattttttagttgtctggattatgtggactattcagcacttgctaaaaagcatatgtattcattttccagggctgcagtaacaaaatatcacatactgggtggcttgaaacaacagaaatttattctctcacaggtctggatataagaagttgcaaaccagtttgtattctggaccagactcccttccaaagctctgtagaagaaccctttcttgcctcttccaacttctggtagccctaggaaatccttggcttgtgacagcataactccaatttctgtttctgtttttacatggccatcacctccctgtgtgtatccatgtgtctataaaatttctctctcttttttcttccaaagacatcagcattgaatttatggtgctgcctaatccagtatgacctcatcttaacttgattacatctgcaaaaaccctatcttccaataaggtcgtgttcacagggaccaggggcttgggcttgaaaatatctttttgaaagatacagttcaacccactacagcagacaaagcagaaataaaagaggcattaaacacctgagaagagatggtaaagcagggaggtgtagaagatctgatgcaagcacatatttaggagaaatagataaatagcctcaaaaagtcactaagttttacctgtaattacaatagagcaacacctttcaatgtgggtcaggcagaaacctgcaaacgtatcttcgggctatgaataagaaacaggatgagtcaagcagatttcttctacctaggtggcagtaaaatgctctgaggatcctgatataattttggtcaaattatttaacacaatcctgcaaatggcacctacccacccatgccacaccacctttgcatcgtcaaatcagagattgtgacatattgagacaaatactgtgggccttacactggagatgaggtatccttgatcatctaataaacccaaattaggtaatgatctgaggccagtgtttgccctgtgtcctggatgcctctgggatggtcgtgtgttgcactacatgtttaagcaagtatctcagtctaagctattgtccactcatagactgactgtgtctgtttatggcatttccttacacaggtagttctgaaccaagcaaaggaagcctgatggtcttctgcccaaaactggttaaaaaaaaatggtggctttactctatagtcaatttaataaatgacttggaaagtcctcctcatatcacatcagcatgtcagtttttgccttctgcaaagtaatattcggtttccactgtattgactcaagtaaatatgttcacactatggcaaaatacagctcactgtagcaaaactctcagcgggagaatgttgtacactttggtcacagttacaatttaatttaggggtttatctgtctgcagtgagattatgggaaagaagcataggtatcggaagaaaatgttgatgagggattctgatatttgaaaatggatgagtttccaaaaagaagagcataaaactctctggatcaaattcagatagaaagctggcaggttgcctgatttgtaattgcatcttgaattgagctgtaatcctcaccacttctgaaaacaataagaataagaaaatgataaaccacatttgttttcaatagcaatatttgttcagcattcctaataaaatatttccctgatgttttggtttatgctggcaagtcacaaaattaatgatatgtgttgtgtaaggagggaaaataaaataatgtattttctagggaggaaaagaaaacagtattttgtagaggggtggaaggaaatcctgtattttgtgaagaaaaaaagaaattatttgttagattttctgtaaagtagaaattcatatactttttttaacaaaacaacattttaggtttacaacctatgaatatatgctcttcgtacacaacagtgtgggttttacaccgagccgagaagtgactgtgacaacgttagctggtcttccagagagaggagccaatctcactgcgagtgtccttaaccacacagccatcgacgtgaggtgggctaaaccaagtaagtaagcttctcatacctgtgttaacactttgtgtatttttaaaagcatattctttctttactatgaacctcccccatgtacacatcattttgatagtgaagtgttactggtaaatttttaccaattgcagattgacagggctgtcattgaaaactttagaagggccatttttattagtacccaaataaattagaaatggacacattaaaactaaaaccctggggcccctgtgccattcttaagatgcaaactctctcctactttgacattgttcttgggcctcctgctctccctctgtcatttcctttgcatgaacaacgtaatttctatcataccaggcaattgtgatagacatgtccatgtattaattggatacaatgtactattgttcaccttccttcagagagctctgccctaatatcttgtaactcgtcgctcattagcaagaaccatttaattggattgcaataatggaacagattcttcccagtggatcatcttcagactggctatgggcagaattccagcttgatccagtaaaaggaagcctagacatcaccactggatccacttaaataatgcagggtcgaccctggacctgctgggaacacttttttaacaggcatttggaagagttcacagagtaatctaatctgttcctgcaacgttagaaaccacagtaactgaaatttcacagttacttggtcagtagggtagtattaacatgttaatttgttgtgatctgttaatttgtgtcaatccctgacgactatcaggaaaaaaaccctgaatctaccatgagaatatgtattaaaatcagtcttataggtataacttgagatctggcaaatagtttcatcaaaacttgtcagaataacaccaaatattgagaaatacctgatcaggaaagacccactcaaaacattttatttatgaaagaacactctgctcactggggtaatcatctattgatgatataaaaagatgaaaagtcactactggttgggcaatgtaaccatgtgattttggttacactggatcagccttgaatttggttacagcttaagaagagagatgctccatttaggacacctgagtgatatcaattgtgaattaaagccagaattgaggatatcaattgtgaattaaagccagaattgaggatatcaattataaattaaatcagtaggttaggtttatctgtgtttccacaaaataatccatctttacaaaagaaaactgtctttctctggtttttataaggctgcaggtttctaatgatctgtgacacttgtattgggatctcttaaaccattttaatggaataatataagttaattgatgcttatggctaccctctgaaacacctctgggaaaaatacaaagtttttatctggggatgtgttttaaggcatatttccattcatctccctcttgctctctactccacctcactaactgattcatcttaaaagcctactcataaaggtaggctctcccccctcatctgacatttgaatacttctgttaagatccggctggtgaatttccaccaatataggtcctttatgttataattgcattcctgaagtaactgtgcttataaaaactgacaaacctaatagatctgaagcagctcactgaagtttcattaccttggtaatctgaacctctgaccttcgggatgtaggtaatgcaatctgctgttatttccattcataccttggaaatttttcagataactatttgtgagcacaaaggttaactctcagaagagggtcagtcttgcgaaagcttgttgcattatcattttcttcttttgggcaacttgctatcttaagtaaattaactagtcgatcctctgtgaaaggtggcctattttttgcaattttaattttaaattgttgtcttgattggataggaaaaacatggcatacagtctaatatgctcaaaggcaacaaactatagattgaaaatactttgcagtggaaaatcatgttttaaatttataaatatttgcttattaaaaatcaccttccaatgtatatatatatattttaaagcatggtctttgtctattatgaccctccccatgtacacatcattttggtagcaaaatgtttctggtaaatttttatcaatcacagattgatatgtataagttattaaaaacttttgaagggccagttttaaacattagtatcacatacatgatatgtgagataaaagcgtccctgtgttacttcagttcatttttggaaggcagatgttgcaaattggcaacacagtggccatatttccttcctcctccagcttccatacactgttttgcccacagtatttgaaaaaataatatttgcaaacatttaagaattatacataaagataatttgaggattcacttgacaagtcaaatgatggggtgaaacaatacccacatttctggaaggaaactatcagctggaactggcttcccctttagacagatcatgccctaaaaatctgacccggtccccattttcctggtcccaatagacaggtgatgtttatccctgctttatatgataatacaaaatattttgccctaaacaaaatacaccaaagataaattatattgtaattttgaaaaatcacagtttttgtatttgaaaaatacctcacttaaattatttatacaatcctcagaaaagcacaatgagatagaaaccagcccatagtaacttaccaaaaattatagaaagtaccagttcccaaactcaaacttaggactcaggcatcaaattttctatttctcatgcgtttagacttaacagtcattaacactttaacaagaaggatttaaaaggatccttctcatcttgactgctcagtctaaaatagaaggcaaaataagaaaatgcctaccaaagggagtacagtggagagatagtgcctcctttgaagctgattcactaaggaagtcagttgtggccagaaaagagcagtaaaacactggagggagtgagagggcaatgctttgtaaaagaggaaatgaaaaatcatcaaaatattgtctactttactgtctgtcaagagctcaccccaaccttcagatgttcatatcttgtatcatataatcctcctggtcttgctctctccttcctctttttttccatcttccttctttctctatttccttttttaaaatgtttttgtagagacaggttctccctatgcttaggttagtctcgaattaatgggctcaagtgatcctctctccttggcctcctaaagtgctggaattacagccataagggaccatgcctggccatttgtctatttctcttcttctaccctctctctctctctctctttcttcctattttccttccttcctcacagatacatttatcactttctctgtcctgagcactcagtgaactctggaaaatgcataaagtatgagggtatcatcattaagagggcaagtttaaaaccacagaaaaagcatttgtctcatcctgatctcttaatcagaaactaccaggtttgatagctagaagtatatctgactttgcctgaatttatctgattaaggtggcaatatctgtaaataattccaaatctcatctcttctaaaaagcacctaccattgttgcctcaccttgttcctctgttctcttttccatcactttagttatcaaatagaagagaccacatctgacttttccattgtcttccttctcagtcacttgtgcacctgttgtaatctgtctctcttcacttgtactctacatggttttcttaaagtcattagttatcacctaatgacccatttcaaaactctcttctcaatgccatcctactgtgttcctcttgtatccagcactgtgaatgatcccttactgactataattcttccccaataatcattactcccctcttctcaccaactacttcttctcatccctaaagatgtttctcaaagttctttcctgagtcttcctatcatactcctgttctcttgttggtgattccatctatactcaaggtttcaaattcttctaattacaaaaatgacaaccgccaacattgtatgcagccatatgaataaatagttttaaaatagactttgggatcagggatacttaaatttgaatcccagttccaatatgttttggcactacgacctagaatttaacctgagttccagttttctaatcagaaatatgaagataataactgccctgaaatctgttaaggactaaatgaaataatatatgtttaacaattagtaatcacctagtatttgtaatacagagtattattctatttctaaaatgtgcatggtcctttcaataccattttatataatatataaaaggggaagccatgtctagtaaaagcttggaagttgattttgcaagactattcagataaaagcattttttttattattattatactttaagttctagggtacatctgcacaacgtgcaggtttgttacatatgtaaacatgtgccatgttggtgtgctgcacccattaactcgtcatttacattaggtatatctcctaatgctatccctccccactccccccaccccacgacaggccccggtgtgtgatgttccccttcctgtgtcctagtgttctcattgttcaattcccaactatgagtgagaacatgcggtgtttggttttttgtccttgctatagtttgctgagaatgatggtttccagcttcatccatgtccctacaaaggagataaaagcatttctacagtgagttgaagatgcataaagaatatatgttattttataattacctgacttggctaaaagatagaaatttaaaaatctagttaaaatgttgaaaacttagtctgggttccatggctcatgcctgtaatcccagcactttgggaggccgaggtgggcggataatgaggtcaggagatcgagaccatcctggccaacatggtgaaactccgtctctactaaaaatacaaaaattggccaggtgtggtggtgcatgcctgtagtcccagctagtcgggagactgaggcaggagactcgcttgtacccgggaggcggaggttgcagtgagccgagatcgtgccactgcactccagcctggtgacagagtgagactctgtctcaaaaaaaaaaaaaaaaaaaagcgaaaactactaactattgcatggcatccattctcctctttttcttttagtgatagccttgccccttatctagaaactgcatttactaacctcccttgcaattagtcatggccaggtgaaataccagtagtatgtgtttgtgtcaatagaaagtgaaagacaatctgcatctttttgggtattaaccagaaaacactgggtgtgtgcctacttgttctcttttagcccttcccctggactggaatgaggacatgatcatgttctcaggttcaactatgcagtcgtgtacaacacccaaagagatccaaaatccccataagagaaagttcctgggttcttaagtgaccacatggagcacagtctgttttgatcactttgaagctattacatgagatacaaattaacatggattttatttaaactattatattttggagattttaggtttcaccagcttcgctaactaactcattccctgtttgcccatatcaatttaccttaaaagtagaaattagctatcctgttttttaactaaatataaaatgatgaataattaatatatctattatactatctcctttaaatacagttttctctggcaggcccctgatagaagctggaacactatgagagactaaagtagctctggagtttccaaagtgcaggtgtttggttttgacagatgggtaaactagagacaagacaggagatatgctgctcggaaaactaaggaggctgacttgaaggattattgcccaagaagttaatctttccacttcatgtcagcagtagtaccctcaggcagagtaaagaattttctcaagagcagttttgacaagctcaaattttccaagagctgcttagttggtgacgcagagccctgcaccatagaacttggaaaattggactctaatttggagattctgcgagcaagatcaagacttccatcataaaatcagcttaataaggtccttccaggtttttacatttgagcaacattacctcccaaaatgagcctgctaatgtgagatgtctgaagaatttagtcctagacaaataaattaagagatctaataaatgaaatgatttactataattgatctgaatcagtacaacaaactttttttgtaaagtgtcaaatatgtataatgttagactttgaagcccatacagtctctgtcttaactcaaatttgccactggagcacataaacagcaataaggtgattctgatttttaaataagcatggccatgttccaataaaactttattttggacattgagatttgattttcatatattaggttggcacaaaagtaattgtggttttcgccattgaagtaatggcaaaaaccacaactactttgcgccaacctaataattctcacatgtcatgaaatactttttttcttttgtttttttcccccaatcaaataaatgtacaaaccattcttagcttgcagggggtgggccacactaggccaacaggccagatttagctcatggaacatagcttgctgacctctaatgtagatgttaaaaatctagaagacataattgacattgataattgtcttggtctgtttgtgttgttataacagaatacctgaggctgggaagtcaataaggaaaagagttttgcttagctcatgattctgcagactgtacaagaagcatggctgtagtatttacttggtttctggtgagggcttttgtgatgcattaaacatgacagagaaggtcaaaaggtgagtggacatgtgcaaagatgcaaaatccaagggatgcccggctttctaaaaacccactcttgagggaactaattcatttcttcaaaaactaacccagccttgccagagcaagacaccaagccattcatgagaatctggccccatgcaacaaacacctccaactaggcctcatcttccaaaactagtacactggaggtcacatgaggtttggtggtgatataaacccttgatccccctttgctgggaaccatggcaataatttaaggccatgtaagaagcacaatctacttgctgttgcaggataacttttaactagcccgtctgttatggactaaagccctaattctcagtgtagctgtatttggagacggggcctctaaagaaatacagtcatcccttggtatatgcaggcgattggttccaggactgccccctaagtacaccaaagctgtgcatactcaagtccagcagtcagccgtgcagaatccatgtatatgaaaagttggccttctacacgagttttgcatgggagaatactactttattttttttggagatggagtctcattctgtcactcaggctggagtgcagtggtgtgatctcggctcactgcaacctccacctcctgtgttcaagcaattctcctgcctcagcctcccaagtagctgggactacaggcacatcccaccacgcctggctgattttttgtatttttagtagagacggggtttcactgtgttagccaggaaggtctcaatctcctgacttcgtgatcctcccgcctcggccttccaaagtgctgggattacaggctagagccaccatgccagctgagaatactatattttcaattcttgtttggttgaaaaaagtccctttataaatggacccaagcagttcacacctgtgttattgtgttgttcaagggtcaaccgtaattaaggttaaatgagattataagagtgggacctcgatttcataagttagcacacaggctcgcttgctctttctctctgtctctcccccaaccccttctctccctttctccgatcacagaggaaaagcatgggaaaactcagcagctagaaagtagctctccaaaagccagggaaagagccctcagcagaaactaaatttgctggcgccttgatcacgaacctctagcctccagattgtgagaaataagtttctgttgttcaagccacccagcctttaatattttgttaaggcagcccgagcaaactaatacatatctaactactgttaaaattatttaggaattcattataaaggagaggagcctgttctatatttgagaatttgctccagctaagataaaatttctgaccaaggattggaggttgcaactaaaaataacatttaatagcaaagctcttatccaaaaaggttacaacctttttcagctcactgagattgtaatagtctgttctcacattgctataaagaaatatgcaagactgagtaatttataaaggaaaaaggtttaattgacccacagttctgcatggctggaaaggcctcaggaaacttacgatcatggcagaaggtgaagagacgacatgcgagataggtgagagagagaatgcacacataggaggaactgtcaaacacttatgaaaccatcagatcttgcgagaactcactatcatgagaacagcgtgggggaaaccacccccgtaatccaatcacctcccaccaggtcctgcccttgacacatgggtattatggagattacaatttaagatgagatttgggtggggacatgggacctaaccatatcagagattaacttgatattcccacaagtagggcaatacctgctcagataaatttatgtggtccacaaaatatgcatcatacataataggattagaatatctgagaaaatatatcccaatatacacatatttaacataatctcacaggaaatcccgatttctttctattgcatcaaatacaagcaagtacaagccttaactccatattgtataactgtaactcaaacattcacattgtagtttttaagttcacctagttgccacagaaacacttgaaagataacaaaatcctaagctccaacaaccatctgagtggatccccacttggccaaggggacaccagagcaaccttgaaaactgagttcttggctacagtgggatgggaagtcagacacccctccctggctatacaccattagggttacttccctaagtgctaagcagaaaccaccctttcaaaagattccaccactgatatcaaccaaccacctgatgctgcccctcttctactaactgatgagagacctctggccacagagttgtcatggccagtgtatggagaatctgcagtcagggtcttcatgtcctcttcttcactgcttgatgtcagagggctgaaaactccaccctcagattgtgctaatgctgccatttttgtacgtgggatgcaccaggggatgtaaaactcaattgcacatgtgcgtgtttctcctttcataaatactcatgactcttcctgaggcttattgaatatgtatattcagtcaccccactcagcataaattcctgttgctcctcccttgaagaatcttttctggcttctggcttaaggctaccatatgcttcccaggctgtctgaatggccatcctgcaggctgcaaccctttatgagaagtaaagctctccttttcaaatttatgaacctcttctgttgacacacttcaaactcaagaagtctcaaatgaaacaagtttcaaaatctcatcccataattccatgttttctatcttatttaatgggattcacccagaaactaaaaccaaaaatctaagctatagctgtatctcttccttatccctttttaatttgtttatttacttatttgtacacgaataagttctttagtggtgatttttcagattttggtgcacccatcacccaagcagtatacactgtacccaatggttagtcttgtatccgttgcctcccttccacccactcccccgagtgcccaaagtccattgtatcattcttatgcctttgcatccttacagtttagctctcacttatgagtgagaacatatgatgtttggtttttcattcctgagttacttcacttagaataatggtctccagttccatcaaggtttctgcaaatgccattattttgttcctttgaatggctgatacacacacacacacacacacacacacacacacacacacacacacaccaaatttttttatccactcattgattgatgggcgtttgggctggttccatgttttcacaattgtgaactgtgctgctataaacatgcatgtgtaagtatcttttcatataatgacttcttttcctcttggtagatacccaggagtaggattgatgaatcaaatggtaaatctacttttagttctttaaggaatctccacactatttttcatagtggttgtactagtttacgttcccaccaagtgtaaaaatgtgttctttgtatcacatctatgccaaggtctattattttttggttttttgattatggccattcttgcaggagtaagatggtaccatattgtggttttcatttgcatttccctgatcattagtgatgttgagtatttttcatatgttttttggccatttgcacgtttcttggccattcttcttttgagaattgtctattaatgtctttagcccactttttgacttgattgtttgtatttttcttgctaatttgtttgagttgcttgtagattctggatattagtcctttgtcagaagtaaagatttttaagactgtctcccactctgtgggttgtctatttactctgctggttatttcttttgctgtgcagaagctttttagtttaattaagttccaactatttatctttctttttgttgcatttgcttttaggttctttgtcacaaagtctttgcctaaactaatgtctagaaggatttttccaatgttatcttctagaatttttgtggtttcaggttttagatttaagtctttgttccatcttgagttgatttttgtacaaggtgagagatgaggatctagtttcattcttctacatgtggcttgcaaattatgccagcaccatttgttgaataggttgtcctttacccactttatgtttttgtttcttttgtcaaagatcagttggctgtaaatatttggctttatttctgagttctctattttgtttcattggtctatatgcctatttttataccagtaccatactgtttttgtgactatggccttttagtatagtttgaggtcaggtgatgtgttacctccagatttgtccttttagcatagtcttgctttggctatgtgagttcttttttgattacatatgaattttaggatttttttcaagttctgtgaagaatgatggtggtattttgatgggaattgcattgatgggaattgtgttgatggtaatttgatgggaattgcattgaatttgcagattgcttttggcagtatgatcattttcacaatattgattctacccatccatgtatatgggatttgttttcatttgtgtcatctatggtttctttcagcagcattttatagttttccttatagaggtctttcacctccttggttaggtagattcctaagtattttactttttatttttgcagttattgtaaaaggggttaagttattgatttgattctcagcttggtagctctttgtgtataacagtgctactgatttgtgtacattaattttgtatcccaaaactttgctgaatttatttaacagttttagagggtttttggatgactctttagtcatccaaatgtctctagggttttctgggtacacaatcatgtcatcagaaaacagcaacagttggacttcctctttagctatttggatgccctatatttttttctcttgtctgattgctttggctaggatttacatactattgatataggagttaaaaagaaattaggcagatagggatggtaagagagtcctcaataaggttttccttttaatggagagcagcagcccccaaattatctcttttctgacaaagagcagcctgttaaattgaactgcagacatagataagcaagctggaagcttgcatggatgaatgccagcagctgcaccaacagaaaaaggctacctgggggcaaggcatgttcaacatagtggctccatctgcccttttctttgtcgagcacatgtacagtaagaaacagacaacatggcactggccaggtagagaacccatctgcataacaaaagattaggatggggtgaccaggttattcatgcactatgtaaatggcacacacagtcccatcaatctttaggccctatgtaaatcaggcactgcctcctcaagccagtctataaagctccgtgcactttgccgtggactggaagacccatttgggagcccttctttctctgcagaagagagagctattctcttttctctttcttttgcctattaaacctccactctgaaacttactgtgtgcctgcatccttgatttccctggcatgagatgatgaaccatggatatttaccccagacaatgatgctgcttcagtatgttgaataaaagtggtgaaagtaggcatacttgtcttgttccagttctcagggggaatgcttttgatatggtttggctgtatccccacccaaatctcatcctgaattgtagctcccataatgcccacatgttgtgggagggacccagtgggagataattgaatcatagggtgggtctttcctatgctattctcatgatagtgaataagtctaatgagatctgatggttttataaaggggagtttccctgcacaaactctcttttcttgtctaccgccatgtaagatgtgcctttcaccttccaccatgattgtgaggcctcccaagccatgtggaactatgagcccagtaagcctttcttttgtaaattgcccaatctccagtatgtctttatcagcagcatgagaacagactaatacagtaagttggcaccagtaaagtggtatgctgctgaaaagatagccaaaaatgtggaaacaactttggaattgggtaacaggcagaggttggaacagtttggaggattcagaagaagacaggaaaatgtgggaaagtttggaactccctaaagatttgttgaatggctttgaccaaaatgctaataatgatgtggacaatgaaatccagtctgaggtggtctcagatggagatgaggaatttgttgggaactggaacaaaggtgactcttgttatgttttagcaaagagactggcagcattttgcccctgccctagagatttgtggaactatgaacttgagagagattatttagggtatctggcagaaaaaatttctaagtagcaaaacattcaagaggtgacttgggtgctgttaaaggcattcagttttataagggaagcagagcataaaagttcagaaaatttgcagcctgacaatgtgatagcaaagaaagtcccattttctgaaaagaaattcaagacagctgcagaaatttacataatttacctaagtaatgaggagccaaatgttaatccccaagacaatggggaaaatgtctccagggcatgtcagaggtcttcatgacagctgcgaccaacacaggcccagaggcctaggaggaaaaagtggtatcaagggccagacccagggttcccatgctgtgtgcagcctaaggacttggtgccctgtttctcagtggctccagccatggctgaaaggccccaatgtagagcttgggccacggcttcagagggtgcaacccccaagacctggcagcttccacatgatgttgagcctaccagtgcacagaagtcaagatttgaggtttgggaacctccacctagattttaaagtatgtatggaaacacctggatatccagatagaagtttgctgcaggggcaggcactcatggaaaacctatgttggggcagcacaaaagggaaaaggggtgggtgcctccacactgagtcctcattggggcactgcctagtgctactgtaagaagagggccactgtcctctagaccccagaatagtagatccaccaacagcttgcactgtgcacctggaaaagcacagacaatgccaacctgtgaaagcagccaggagggaagctgtaccctgtaaagccacaggtgcagagctgcccaagaccatgggaacccacctcttgcatcagcatgagctggatgtgagacatggattcaaaagagatcattttggagctttaagatttgacttccctgcttgattttggacttgcgttggggcctgtagcccttttgttttggccaatttctcccatttggaacagctgtatttacccaatgcctgtacccccattgtttctaggaagtaactaacttgcttttgattttacaagctcataggcagcagggacttgccttgtctcagatgagactttggtctgtggacttttcagttaatgctgaaatgagttaagactgtgggagactgtggggaaggcatgactggctttgaaatgtaaagacatgagatctgggagggaccagggcagcatgatatggtttggctgtgtccccacctaaatctcatcttgaattttagctcccagaattcccatgtgttatgggagggacccagtgggagataattgaatcatgggggcgggtcttttccatgctattcttgtgatagtgaataagtctgatgagatctgatggttttataaaggggagtttccctgcacaagctctcatttcttgtctgccaccatgtgagatgtgcctttcaccttctgccatgattgtgaggcatccccagccatgcggaactgtgagtccattaaacctctttcttttgtaaattgcccaatctcaggtatgtctctatcagcagcatgagaacagactaatacagctttccacttttccccattcagtatgttagctgtgggtttatcatagatgacttttattacattaaagtatgtcctttctatgcctattttgctgagggttttaattataaagggatgctggattttgtcaaaggctttctctgcattgattgagatgatcatgtgatttttgttttcaattctgtttatggggtgtatcacatttattgacttgcatatgttaaaccatccctgcatccctggtatgaaacctacttgatcatggtgaattgtctttttgatatgctgttggatttggttatctagtattttgttaaggatttctgcatctatgttcatcagggatattggtctgtagttttcttttttgtcatgtcctttcctgtttttggtattagaatgatattggcttcaaagaatgatgtaaggagtgtttcttctttctatatcttttggaatagtgtcaatatgattggtacccattcttctttgaacatctgatagaattccgctgtgaatctgtctggtcctggactttttttgttggtaacgttataattaccatttcaatctcactgcttgttattggtctgttcagagtttctattacttcctggtttaatctaggagagttgtatatttccaggagtttatctaggttttctagtttatttgcataaaggtgttcacagtagccttgaatgatcttttgtatttctgtggtatcagttgtaatgtctcctgttttatttctaattgagcttttttggatcttctctcttcttttcttggttaatcttcctacatggtctgtcaattttatttatcttttccaagaacaggtctttatttcatttatcttttgtattgttttggttgtttgtttcaattgcatttagttctgctttgattttggttatttcttttcttctgctgggtttgggtttagtttgtacttgtttctctagttccttgaggtgtgaccttagattgtctatttgtggtctttctgagtttttgatataggcatttaagactatgaactttcctcttaacactgcttttgttatatccaagaagttttgataggttgtatcactattatcattcagttcaaataatttttaattttcttcttgatttcattgttgacccaatgatcattcaggagcagattatttaatttccatgtattggcatcattttgagtgttcttattggagttgatttccaattttattccactgtgatctgaaagagtacttgatatgattttaattttcttaaatttgttgagactcattttgtggcttatcatatggactatcttggagaatgttccatgtgctgatgaatagaatgtatattctgcagttttggggtagaatgttttacaaatatctgttaagtctatttgttctagggtatactctaagtccattgtttctttgttgactttctgtcttgatgacctgtctagtactgtcagtggagtattgaagtcccctgctattattatgttgccctttttaaactcctatgtgtcaattaaagacaggctttttccatctagtgaatccaccattccccagggccttagagtcctaccttagatgggaaaactagaccctcatagacggccaattgctccttcacatctcagtccagatgcatggggcccagaaaatgtagttcaatgatttgacaagaagagaaaaatgttggtattagggagttctagaaatctttgccttcagattacagaagatagcttttatcttccgactatattttaaaatttaaatggtattaatgatattaatggttactaatgtctttctctgttttttcatgccattctattttatatgtaataaagaacttaatatgctgttacttttcttgcctttctcatctgctgttttcaatgttcagtttattattattgttaatattgttgttatgatataatttttttatgcaactattttctctaaatagcttcagtacttatcagcaattcttaaactttcccaatcttgagttctggatcttgattaatctttctgtcttctgaagaagattattggatagttttatcatgaaacttaaaaagatcaattaattagttttatgttctctaaatgtttggtgatataagaaagtatttctctcatctttgcacattctcttaaatttgcccaaataagaaagtatgtctgttgtttttacacataagtaaccatttaaatgtgtataaaattcttggattaaactatttcccctcaaaacttgttgaaattgttccattgtctttcaacatttgacattccacataagaagtttgaagcttatctgatttttttctcctttataaatgttcctaatttttggtttacctttaaaatgtttcaatattccatgatatgtctatgtttggatatattgtgattattttggagaaaactgtattagtctattcagtttgtagacataagtcattttgggtaaggtttattggggcatttcatatccataattatttattgcatttatttttaaggtaattagactttttctgttctcgatgtctataatttttactttcactgatgtccttgtcattttcctgttaattctttgatattgtgcatttttaactctgctcatttctgctttcaacgtacgttttaattctgccattgctttacatggttccttgctctcctttcttatttaaggcagacccctttacatctctgtctttgtggctgtctttttatgattttacaaacctacttcatagaggcttctttttcataaagtaatgtcccttttttatttttggtacaccatgcaaatattttataaaacctccatcccattgtcatagaagtaatatacacaaaacttctgccttggaaggttctagacaagatttcccttgtcttatgctaggaagaagccttgtaacttatgtttttctatttaaaaaaggagagatacattcagacccagcttttctcaatagacagggagggtgaaatttacttgcctcttcattcagctgtttccatgttaatagccttcctctctcagaggtaaaatcaaggtcatcagcctttaattttgtgctggtctattgaactgaagatgtatcttctgtttcttagatggttcactgacttaggaagagtacatcaaagtttaaagaccttatttgagcaatgaaaaagatgcttctatgcatgtactgctcccagaacttctcatgtgataaccaggaacatgtataaaattgtatgtgtttctacatttttctatgttttggacttccaagtgtaacatccacatgagtggagaaacaagtgttgaagcaaatgttggaaacagggagaataggccagaaatccggtacttgttacccagaagtgctgcctgtttctgttctcaagagcctccatatcatgcagtaagacataaacaatggaacggaatcaccatcttttcctgttgtcctaggttctgttctgtttcagagggactggcatacggtgcatggctaagaaaggacatttaatggggtctcatccagacattgacatgtgatctttgctcatcttgaacttgtgctagtggaaatatatttaatgtatctacataggtatattaattggaacttgatagtgcagataacaggcacatttaataacccaagtgaaattaatttatatacgtaagtgaagtttgaaagcatttcattaatattatatctttagggcttgactttataatcagcctgctcacttaacaaactaaaattcaacataaactacaaatctagtacactttgcattataccatagcagccacaaattaatgagtaataaataatgctgtgagacagtagaaaatgatgctagtaacagaagaaacgtttgcactcactacacccatggctttgctgtacttgacgaatattatcattcaggaaaatgttaagggattttaatagtcagttcctgccgatgatcaataatgacctcattattgcatgtgcttacatttttgtgacatcagaggaaagaaacactgcaaaacccagaattttccaaattaattgctaaaggtcttccaatacaaactcttccaactacactggcacatcatacccttttaactatttctagagctaaagtgaaagcagtagtgtatttaggaaaaacaaaaagaaaaacctagtattcagtttttatgcaaaatcaccaagactttaatgtaaaggggtcctttaaagaaacatactattctcaaagctatattactttatatggccatatgctgggatctcacatataagtgaaattggacttcaatagccataaggagaaatgccactttttcctcccaatccttggactaatgctgtttaactttttttctttttttttttttcctgagacatggtctcattctgttgtccagcctggagtacagtggcacgatctcagctcaccacaacctctgcctcctgagctcaagccatcctactgcctcagcttcctgagtagctgggactacaggtgtgtgccatcacacctggttagtttttgtgtttcatgtagagatggggtattgccacgtttcccaggctggtctcgaactcctgagctcaagtgatctcagcctcataaagtactaggattacaggtgtcagccactgtgcccagcctgagcaatttttgatgcataatttgacatgaaatttcagaaggcttgtaagccaacactccacccccatcctaacaaactaaggtaatcgtttctgcttaaaagtctctgaaaataatactgatgtaagtagagcagcataatacttcctacctaagaaaatatggctgttttcatgttctcttgttaaagaatcattgtgggcagataatgagaagcagagcctaaggaaaagaatggataaattgggaggaagaggagaaaaaataatagactggtctttgaaaggataagggttgaagaattgatgagttatatttgcaagacagttagtgattgattttggtatcttttaaaggcttctctacattatagaaacacattgaactagaagagaaggatgagagccctgataaaaatttaagtattatcctgagccagtccttaaggggagcatgctatgtagccctgctacattgacaatgtatataaaaggatatctttctaagcatccttctaggtatcagttagcgaatgttgttagcaagttaaaaaaatgtctctaggatctgtgtcaggaaatgctcttatttgtattagcctagtcttctctctaagattatgttacttatgagcagaagttgttctatgtactgtatactttcattttcatcttagtttcctttcataagtgttatatcaaagttctgatgattcattgaataattataagtagcaaaattaaaatatttaaaggaaattaaaaagatgagacttttataagactcatattcctacataagactgcaattaattatgagattgggaaaaaacgcaaattattaaaaaataaaaactgaccaggtgcagttgttcatacctctaatcccaacagtctgggaggctgaggtgggtgaatcacttgaggccagaagtttgaggccatcctgggaaacatagcaagaccctgtgtctacaaaacactgataaaaattaactagtgtgatggcctgagcctgtagtcccagctacttggaaggctgaaacaggaggatcgcttgagcccaagacatcaaggctgcagtgagccaagattacactactgcactccagcctgagtgacagagcgagactctgtctcaaaaataaataaataaaataaaaactatcaccaccagcaccaccaaaaaggagatctcataagctttttttaacatttccaaaacaaaggctctctaaacttctttttttctcattctagaaagctaatgatagaattttttttttcccctgaaagcctcagctacattcaccatgtcctgcatttattgttgacagctgttcaagacctacaaggtgaagttgaatattacacacttttttggagttctgctacctcaaacgactctctaaaaatcttgccagatgtaaactctcatgtcattggccacctaaagccaaacacagagtattggatctttatctctgtcttcaatggagtccacagcatcaacagtgcaggacttcatgcaaccacttgcgatgggggtgagtccagattctaaaggatatttgcctcagagatgcgaatgaaattgattgattcttgccggggttgagatcagtcatccctccattataaaatttccggtgtgggagggaagggggtggaggctaaaatgcttaagtgctcactgtcatcagtagcagatcaataagcagtcccattgagacagaagcacaagctctaataatgagatattagcccagtttgttcctgttcttttcagtgtatacttattttagaactgagttcacatcaataaatggtgacatttagaaactttttttttaagatttgccctcagaagcagtacgtttttcaaaacgacagccaaacacagtgagagccctccctgagtcaccagaaatggtaggtggaagttcagccactgagaaaaattgcctgtgactcatttctaagccagttagcaagggggaggaagcaagggaagcaacttgtgaatctgaaatgtgtttggaatggtctttctaatcttttttggctttataaagtctcattataaacattataatatcattacctcccaagcaagtgttccaggtcattagcagagctctttaagtgtggaacccatttccctttgtggtgccaaaggtcggcaccttttgtttataaaatagggtagatcacaaggacaattcttcaactagttaagatgggttcttatgataaaaataggtctttgcatagttatttctgacatgcttgaataattatgcaatttaacgctaagcaagatttttttcttatgttagatttcatcattacctatggtaatcaacattcaaaatcatttacataatgacaatattgcattattgcttcatattgcttgagttacaagctagtaacatcaaatgatttttcacgttccaccagcctcattgtatttgagttttattttttgctcaaggagcaaattttatttccttccctccctcccctgcaccttggaggtatagagtgaaaggatggaaaaaagacaaaaaatagataagtgttagtggtgcagatgggtgaataatttatcatcatatcccactggtcacatagtattgaagattagcactatgctggtggtataaagcattttaccaccaattcttatggtttctaactgagagtataataagccaatttacagaggactacagactgtgataacttcatcagcgaaaagcagataagcgaggaaccctttgctaaacctaaatactaatctgcatttagcttaacatgtgctttttcagagacagctggagtttattcagtttcttcctttaattctagagcctcagggcatgcttcctccagaggttgtcatcatcaacagtacagctgtacgtgtcatctggacatctccttcaaacccaaatggtgttgtcactgagtattctatctatgtaaataataagctctacaagactggaatgaatgtgcctgggtcgtttattctgagagacctgtctcccttcactatctatgacattcaggttagaacattgttttttgatggttaggcttatggatatgttaaataaaacatgccaggctatgtcttcaagtggatatcttctgtcttggttacagattatttctttggtggggaagggaaaagagagaagggaaattgatcagaattaaatctgtgtgctgtaggcaaacatgtgagtctctggagagaagataatgataatatggaaaacgatggtgatgaggatggtgatgaaattctcactggcaaaataaagctaatcatgtattctaaataaatcttgttgagcagcttaccttttcccaggatcttttactgaaatcaaaatcagaatcagtttgtaaatgtggagatgtttttttctcttcccatttctcctatttactaatttaatatctccagagaagttatgaaacttcacttggtgtcaatttcctcttttgtaagcgcaatggactagatgtcttaaaacattctagccacctctagcattctgtgattctgaatgcaacaggaagacatatataaaaaatatagcagacaaaaaatattaaaaggttttatctgaaggtgaaagaaatatatttattcatcactcaaaaaatgttcaatgttctccgcatatgtgagagcaattgtggttaaaattttttgcccttggacttctttgagaatcttatgaagtcagtgtactctgccttagaaaaatatttatgcacttgtatgacaaaatttaacacataatttcagaaagtgcactgatcacttgaagtcaaattcatagacttcttcaggggctactggccttaaaagtagaaaaagtatagggaatactaaggcatataaaacaaggaacttatcttcacggaattggaaatcttgttggagtaccaagccataaaagataacaaggctaaatgtgcaaatgagtgataaaaaaaaatcagagtatttcagaaaccccacatttagagaaagcttgcaatttacaaaattttttaataaactatgctacttctaaaattcataagagcttcgtaagataattttcagaagatattaagcacagaaattttatatgaccacagaaactttttactggttctatccatttaatagtactacctcattcaggtttccatctccttttcctgacatttgaggttaagacatataatcatctggctacaaccaacactttagtctcccctactctgactcatagacctagcttcctaagaaaaccaaataaaaatatctttgaataaagaagaaaggtacattaattatttttctttttttttcatttaaatgtattttattttaagttcctgtatacgtgttcaggacatgtaggtttgttacctaggtaaacgtatgccatggtggtttgctgcacctaacaacccatctaccaggtatttacctgtacatgtattattagctatttattctgatgatctccctcccctgatgcccccccaacaggccccagtgtgtgttgttcccctcgctgtgtccatgtgttctcactgtacagctcctacttataagtgagaacatgtgatgtttgtttttctgttcctgtgttagtttgctgaggataaaatggcttccagctccatctatgtccctgtaaaggacatgatctcattcctttttatggctgcatggtattccatggtgtacatgtaccacattttctttatccagtctataattgatggacgtttgggttgattccatgtcattgctattgttaatagtgctgcaatgaacatatatgtgcttgtatctttataatagaatgatttatatttctttgggtatatacccagtaatgggatggctgggtctaattgtgtttctggtcctaggtctttgaggacccaccacactgtctttcacaatggttgaactaatttacattcccaccaacagtgtaaaagcccttctatttctccacagcttcaccagcatctgttgttacttgacttttcaataatcaccattctgactggcatgaaatggtatctcactgtggttttgatgtgcatttctgtaatgatcagttatgttgagctccaggtgcccaccaccacaccaggttattcttttgtgtatattttcagtagagacagggtttcaccatgttgaccaggctggtatcaaactcctgacctcaggtgatccacctgcctaagcttcccacagtgctgggattacaggtgtgagccactgcacccagccaagtatctactttttgaataatccctttatatgtcccttttacaaagaaataataatttcatttttattcagttttacctctttttaatataaatatagtaagctttatatgtttgttggccgcataaattcttctttggagacgtgtctgttcatgtcctttgcccattttttttgatggggttgttttttcttgcaaatttgtttaagtttcttatagattctagatattaaacctttgtcagatggatagattgcaaaaattttctcccattctgtaggttgcctgttcactctgaggatagtttctgttgctatgcagaagctctttagtttaattagatcccatttgtcaatttttgcttttgttgcaattgtttttgatgtttttgtcatgaaatgtttgcctgtgcctatgtcctgaatggtattgcctgggttttcttctaggatttttatagttttgggttttacatttaagtctttaatccatcttgagttactttttgtataagatgtaaggaagggatccagtttcaattttctgcatatggctagccagtttttccagtaccatttattaaatagggaatcctttccccactgcttgtttttgtcaggtttgtcgaagatcagatagtggtaaatgtgcagtcttatttctgagatctctattccgttccattggtccatgtgtctgtttttgtaccagtaccatgctgttttggttactgtagccttgtagtatagcctaaagtcaggtagtgtgatgcctccacctttgttctttttgcttatgattgtcttggctatacaggctcttttttggttccatatgaactttaaagtagttttttctaattttgtgaagaatgtcattggtagtttaatgggaatatcattgaatctattaattactttgagcaatatggccattttcatgatatttattcttcctatccatgagcatggaatgtttttccatttgtgtcctctctgattttcttaagcagtggtttgttttcattgcacaccatgattcccatagcctacctgagttgtcttagcatggaatatgtggactgatgtttatgttcatgattcttatggtgagtccatgtatgcaggtagaccataggccaaattatgaaatagaaatcatgctccaaataaattagaaatatagctatataaaaaaggctaacacaggaaggtgatggaggatttgccgtattgtcttcttttgaccagtgttcgggaaagctgagttttcaaaggcaccttattcatttgctttaccaagactcgaaacacacaacctagaagtgagaacactgtgtgctgtgcatgcatgtgcagctcagctttctgactctggatcaagagttaacgtttaaaagtgtttaaggcctattctatggaaaaggctttatttataccactactggtttgagtcaggtataaataactcaagccagtaggtataaagcctcctcttctggtagcctgaggagagtggaaacagatgaaaatacaaaagatcaaagtagaatccaataatagaattttgttattagtgcctaagatattcttattactgattactatattttttgtgaagctttttgcagtccaggaatactgtacttgatatagctgttgcatttctggaaatttgaacatcaaatttcagtgattttcattacgatgtcaaaggtgatttagtttcatttaaaataagcatttgattggaatgcctaatactttagaattaaggctctctatgctaaccccatctgtaaaatagctattgattttaaagcacataacacactcaagtatctacttttttttttttttttttttttttttttttttgagacagagtctcactcttctcacccaggttggagtgcattggcacgatctcggctcactgcaacctctgcctcctggaatcaagagattctcgtgcctcagcctcccaagtacctaggattccaggtgcccaccaccacaccaggttattcttttgtgtgtattttcagtagagacagggtttcaccatgttgaccaggctggtatcaaactcctgacctcaggtgatccgcctgcctaagcttcccacagtgctggaattacaggtgtaagccactgcacctagccaagtatctactttttgaataatccctttatatgtcccttttacaaagaaataataatttcatttttattcagttttacctctttttagtataaatacagtaagctttatatttgtgtttcattcacatgttatacaatatcgttttagcactagaaataggtcccaaaatggagactgggaatgttaacattagtaagaataaaaacatattggcacatttctctaacatttgaggttaaaacatatataatcatctggctaccagcagtagtcattggtcattttcctttgaccaatgaatcaaaagaaatgttttctggagaaacatttgaatatacctaagtagtttagagcttaaagttatgtttaacatttagatgagaagccagtagggtacagtggagaacaactcagatatcccaaatcttaccagcttgacaatattccctggcttctctgcaaatttgtttaaatggagttatgaggaatcaatacgattatttgtgcatatatccattataatatttggcacatattagatacataataaattcagttgaattgattctgggttatctcattatgtatcacagaatcaaatttttccaatatgtataaagttcattttcattaattatattacagcattatattttaagttcatctgcctttatttcagatttaattggacatgctcagaatgtaggcccttgatagtgtttaaatatccactattaatacctcaaaagactatatggcatcaataagtaacacaactcatacagcattatgaacatatgcctcaactaacatttaggtaccctatgaataaaatagcatatctagtaaatacaagaatcccatttgcctttcctcaaccaccaaaggaacagagaactgtttcacataaaagctcggaattaatgtttaagattcatcagtacctagcttgccttctctatttatatattagatgcttaaagtaaattagcactgtaaaaagtacagtttctctttggtttatcctttaattgagagcagaatgatatcgctttgcagatgttcccaatcttttgcatattcatttctctctcctccctcttggttaacgtgttccttttgtgtgactaatgcttgatgaaccccatttctaatcttcagttattccaccctcctcggtttttattcagattaggtggcagaattaaagggatgaatgatgattttctgctgtgattaaggtaaaaatacaattgcatctggaacaaatggatataaaatacctcagccatattggaaggcttctctaggcctcatttttcctccattagacattagcatttaggctatttgttttacagtgtcaagacttccagaagataccatcattacactacttagttatagatttagagaacagtgagcagtgataacctgttatgcttgcaaactgtcacttgggcatcttccattccttgactatgctcttcagtagattaatgtatctttctctttgtgaatagttgcaaccagagagtaaacatcatcattcccattactaaatcaattatcttgatcccaattccgtaccttcctctgagctcattcctttggagtcagttaacatcaaaaatgaatattgattaaacctcaagaggctatagagaaatacaagagattcatgtgaaatgagggaaggtgggattcagactattgttagtaagtatttcaaaaatggttgcatttattttttctaaactaatgtttgcaggttgaagtctgcacaatatatgcctgcgtgaaaagcaatggaacccaaattaccactgtggaagacactccaagtgatataccaacacccacaattcgtggcatcacttcaaggtacaaaattttgtgtcagttaaatctaaggaactctgatcagaagaaatgaaaataaaaatcaaaggtatcctctcagccatgacaatctcatttaatgggttattataagtatgtgtgtaaatcaaatttttgatattatttcacagatattaatcttcactggacatccaatggcatttaatctttaatttccctgattgcccagcctcagatttcttatttagtaacctgtaagcaaatacttgaaatacatgtctccttatttgaatgtgtcctttagtgaatccttttgcggagcataatacaagcttaattgtaatgactaccttctaacttaatctttttgaaaaaaaattgatttatatacatcagagtgccctaaagctagaaatctgtaaaattagtagggcagataatgtttagataagcattaccaattttgtcagcttcttggtagaatcactttatttttctttattcttttgttgctgagaaatgaccatagtttgaaagcgagtctctttataattcataattagtaacaacaacaataataataatatttggtattgtttccaaagctgaaaataagatggtaaattgttcatccgtttgtatcaagttgaggctgggaaaagaaatcttagtgctttcacattatactttttgcttaagccaaatgaatcacccttctcttacatgtgcaaacaacacacacacacacacagacacatacacacactgaaataataagtctattattaatgtttcaattctgaaggatttctctatgacatgttgaaatttctggatcttaaatcagttcaaaaaattagtactggttttggcaaccaatggttaaaataattagaaaaattcaactaacctgactgttagctgttcgtggcaataatcatatcttgtctgcttgagtatatcttctatcaaacacatgatagatactgatctaatttttggcatactaattagtttataatccccccagcagatatcccccaacctattcacagtattatctactatgcagggaggaaatagtcatattaaatgggcgttagagacctttattctttagcaaacacatctgtggctataataatatagaaggcaaggtggggcgtggtggctcacgcctgtaatcccagcactttgggaggccgaggcgggcggatcacaagctcaggagatcgagaccatcctggctaacatggtgaaaccctgtctctactaaaaatacaaaaaattagcagggcgtggtggggggcacctgtagtcccagctactcgggaggctgaggcaggagcatggcgtgaacctgggaggcggaacttggagtgagccgagatcacgccactgcactccagcctgggcgacagagtgatactctgtctcaaaaaaaaatatatatatatatatatatatattatatatatatatataatatatattatatatatataatatatattatatatataatatatattatatatatatatataatatatatacacacacacatagaaggcaaaagtaatacaaaagagcataagacatgattctaaatttgcaaagttccagtccactggggaagatactcccctaaataaatgtttatagaacaatgtaaaaaacactataataagaggtttagatgtgcaagaacataaagagaaaaatagcaaactttacccagaattatcagtgaaggcatcatggaagatgtgacctttgacttcagtcttgaaaagctcaaggaagaattatagttaggtgggtggatgttttcaaattcttgtctgctggcatccccatgactcaagcccatgtgaatgacgtaacagaatatgcctcatagtacatatttatttataactaaaaataacgtctaagctttataagaaatggaacaaatgtgactgtgtctctaggttttttttcctttaagaagattattgcacataataacagaggacaaatatttttagttgctattaaaaattgcttgtatccaaatacattaaattgatgacagaaacattaaaaagagtattatacaacaagaacaaggaaagtgagagaggagacaacaacagaaaagagattgcaacacaattttgtaagcaatatttgtcagaaagaagcaaatgatttaatacagtggagaaatttacaaccaaaatattggttgacaaaagacaataatgacaggaaacaaactgttttttccacagagaactggagaggctgagcacttagaagttttaaggatgtaaagaggaggagagagggtagggtttaaagctgaaatcatggggtgagacacaactgttaacaaataagtgtttggaatcccaggtctcttgcatctttgctgtgcatccaggggtctatttctcttcctccacatgacaaagtccaccgaccaggagattagacatttattctctggagaaactgagggctactaggcagaggggagctgagatgagacacagaagtaaaaacagtgataaagtgagactacaacctgaatggtgggctttttggctaagtttcccagttctgccctcaaaagcaagtagacaagtcataaacacctccagataggaaactgaacatagttttctagaaaaaaaagaatgatctcaaaaaaaatacctccagataatagcatatagggatccctaacagtaaaaacaacttgtcctctggtcacccagtagggaagtatgccaatcaacaaggctcacctaactataaagcttttagtcagctttttttttttttttttttttttttggtgcatcactcttaaagataaaaaggggaccaaaataaacaaaagacatgatacaatagattcagagataatgcaggtgaggaaaaaaaattatagcctcagacagataaaagaaaattctctaaccataaaacaaaaccagcatacttaaaaaaataaataaataaccaacgaggagaaaacttcatggaaattaaaagggtgaaaagctgaattgaaacttttgaagaaagttcaagggaatgtctctgaaaatgcaatgaaacacaaagatttaaaagagagagagacaaagaaaaaacaatagagagtatccaggaagtctaatatttgaataataagagcttcaaaagagaatcaaaggaaaagagggagaaaatttaaaaaaaaaaaagacaagaaagtatcccagaaccaatgtactactgtgcagatcaaaagattccctggataccaacaatatgactaaaaagtgattacatataaagggatattatcaggaaattgcagagtaccatgtttaaaaagcacatccaaaaagctgccaggaagaacagacactaccacaatcaggatgtgaagcagcatcatgatgtcggtctccattattgctaacccctcttctacccttcctaaaactaagcaaacactgccatgttttgttatgtataattctgccttttccatattgtcatgtaaatggatcacataatatgtagccattcaaatggcttcttttagttagcataatgcatttaagatttgtccatcttattatatacatactagcagttgtatacatactagtagttgtcagtttttgttgctgagtaagattccattatatgaaagttctacagtttgtgcacagtttggataattttcagttctccgtgaccacgattaaagttgctgtaaaacatctatatacaggtttttgtgtgaagatatattttcatttcatgtgggtaaatacccaggagttggattgctgagtcataaactgccagactgatttacaaagtgactgtaacatctttcattcctactagcattgtatgagagttcaagttgctctacatttttgctagaacatgagatactatgaggtgttttcctcttattttttaaatagtcattttaatagatgtttgtggtgtgttattatggtcttaaattacattttccctaatgactaatgatactgataagctttgcaattgctttttgcatgcactttggcatttgtttactctgggaaatggtatctccaaatcttttgcaaatttcttaattagattctttgttttcttattttttgagttttgaaaattttttaaatatattttggatttgagtttttgtcacatatgtgatttacagatatttcttctctaccttatgatttgttttcaattatcttatttgtgtgtttttaagagaaagagttttaactttccaagagagttagatttgttactttttccttgacagtttgtgcatctggtattttatctaagaactttttgcctgagttaaggtcacagagactttctcttgtctatttcctagaacatttgtatgtttacatgttgaatttatgtctatgattggttttgtgttaatttttgtatacactgaggcatgagtcaaggttaattttttttggcatgtaagtatttaatagtatcaacaaaatttttggaaagattatcttttctttattgaatatttttagatttttgtcaaaaatcaatttaaacacgttttgtaggccatttttggactctcttttatgttcaatttatcaatatgtatatctataccaatatcgcacaatcttgattactacagctctatagtaagctgtcaaatcacattgtatgagtcctccaactttgacctttataaaaatcattttggcctttctcactactttgcctgtccatataaatttcagaaacaggtcattgatatctacaaaacatgtgattttgattagaactgcattgaatttgtggatcaattggtagagaattgacatcttaacaatatcaaatgttctgattcaagaacacactcttgctcatttatttgcatcttctttcctttattttatcagtgttttatataatccagtatgcaaatactgcacatattttattaagtttatacctaattacttatttggggggtgctattattattgtttctttaaaacaaattcaaatccaattgttgctagtgtgtagaaacacaattaattttggaatagtgagcttacatccagcaaacttgctaaactccttgtaagtcttaagagcttttttgtaattccctagtctatatagatcttctacaaagagaaactgtttatttttttcatttccaatcagtatgtcttttatttctttttcctgccttattgcactggatagtttaataacgtgataagagcatatccttgacttgttcccaatctttgaaagaaaactttcagtcttttacccttagatgtgatgttacgtatgaaatttttggccatgccttttatcacgttgaagaacttactttttatttttaatttgctgacaattttcattataaatggacatggaaatttgtcacatgcttttttgacattttaaatttgtactatgatcgattatatttactgattttaaattattgaactagtttgtattcgctggataaccagaacttcgttgtgacatattttcttcttcatatattgggggatgcaatatactattatcttatagaaaatgttcatctgtgttcataaaatatattggactgtgtttgattttcttgtaatacctttgcctggattgggtatcatggtaatttctggtctcatactaacttgggaagcatttccttcttttctattttgtggaagagattgtacaaaagtgttattatttcttaaatcttggtaaaattcaccagtgaaacccatatttgcctggagtttttctttgatggaaggttttttaacttggaattcaattcccttaataatgtatgatatttggcaatttattctccagtgagtttagtcatcttgtgggtgcagaaaataggttaatttaatcaaatttgtcaaatttattagcaggaagttgtttgtagtatgtttgtactacaaacaacaatttgttgcaattgattttattctttcatttctgatattggtagtaagtgcccccgtttttctgttcagcctagagttttatcaattttgtagatcttttcaaagaaccatttttggctttatttattttctatatcatctacattgttttctattttccatttcagtgatttctgctctctattgttttcttccctcttgccttgctattgcttctctagtttcttaaagatgaaaactttcattattgatttgagacctttcttcttttctctcagtcctgcttcggtatgaagctcacaaattttgaaatgttgcattgcacttcatttattcaaaatatattttaatttctcttgagacttctttaacccatggattatttacaagggtattgtttaatttccaagtatttggggatttttcagataagtttctatctgagtttccagtttaattctattatgatctaagaacataattttagaattccaattcttttaaattagttacagttttttcagggcccagaatatgatctatcttagtgaatggatgtgcacttgaggagaaggtacagtctgttgttgtcagatagagtgttttgtaaatgtcaattagatcaagttgagtgataatggtgttcagatcatctatatacttactgattttctgcctgcttgttttatcagttattgtgagaatggtgttgaagtctccaaatgtcattgtggctttatctatttcttcttcagatctattagtctttccttcatgtactttgatgttttattattaagtgcatacatgtttaggattgttaatgtcttgataaactggctcttgtatcattatgtgataagcccttttacttcctgataatttccttgttcttaagtttattttgtctaatattaatatagccactccagctttcaattgcttagtgtaattctgggtgatttttcgattgattccttcacattttgaatattacgttataaaaatctgactcctgttaaaatcctttgaagaaagttagagttcttatttacttttttcagcaggttaccaactggttagcttcagactccaaattctgttttcctttgccagtgactacagtcagttcctattttttcataaagtagcataacaaagctataaactttgctttactactctgtgtctgcacaatggctaatttgggatttggctgtagaattatgtaatagttctgatctcaaaatcttcgctgtgctgcttgcataggctatgcatgtgaggcaaccataaatgtgcagcttggagttgagtcaggacttgcgttcgttcattcataaaattagcttctagctttcttctctctgaaatgtcccccatctttccagctcctttggacttccttccctggatttttggctagaatgatatgatttcttttgaaatgtttgcctcccagcctgcctccaaatttgcataactggagttgttcttaggcaatgaggtaagaggaattcgagaaaaaaaaataacaaggacttcccccacattctttggactatagaggccccatttcctgatttctctggacagaaagatttttccccccgttggggctttagattccaatttggccacagctgccgcagtgcagctccttggctctgatcatcctcggagcagggcccagcagaaagaagacaaaacaaaacaaaaatgggggttttccctatactctctggcttgcaaggcattttgttctagatactctagccggaaaaaatttactttctctaggattttgcttccctagttcacagtttcacactgatactgcccttgggttaaagatgggaagtaaaggagggggaaaaaaaatgggaaactcaccctgtaacattcattcttaaagttttgtctcccctcctgatcagccttattgttagcttttcagagtcctcaggtagttactttatataatttttgcagatactgagttgtaatcagtgggagagataagctgtaatgggcttattccatattggcctgcatgggaagtccccctccaccacagttttctttcttccaatgcctttggcaactttccttttcccccccagtcagaagcctagcaaaaacttgatagaaatcattcataaccaaatattggcatgtaaaatctttcctttcttaaaatgatccatagtagcagagtaacattttccaaaggcaagactctaatgagcaactataggctgccaagccattaatcaaaattataccaacaccaaagcagttagccttgtgtgtgtatggtattgtttgtgtaatttcattatacttctggcaatgtatacttgttagttatgtttctattttggttttaaaaaatctttcatattagcaacatgcaaaatgaaatgtgaaatccttccagaaaaacatcagcagacggggtctacttctctagcatttaaaataatttggtttctaagaagccatacatttcttagattctttgtttatttttggtgaaattcagaagtcagtaaaatttaactcatatatttcaataacatacagatagcataccagcctgtttgattatatgcgtgcagtgtaccaactcatctttgtctttggccttaacttatgccttgtttttgactacatcttcagcagtacaagcccttatgcatgtttttcctcttatatataaaccaaagattccatagcacacaaataatatagaagaatcaaatggacccttctagttttataagctgctgcttcagagacaagccctgtttctacattgcattttccatacttctcatattatcatcagctccttctatatcccaaaagaatactaactactgatcgataacccggacatgtctggccatggcctacatgtgccctgggtagttcatttatttgtcttggtggatttgctagagtggaatttaatcaatagctaattcattaattctggtcctcgagaatgtagagactgacctggatgaagataacgggctgggtctggctttgatagaaatatgacaaacactgcagctgacagcttcactaggtactgtgctatgaagtttagttatttattccccataaatggagacactaagaaaataacacaaacaagaaagatgttttattacattactgttagtattccaaaatgcatcatttccaggcatgaggctcaagggaaagtagagaaagaactcagatcatgtcttttaatgtctttaattggaaccatggcagttttttcacatccaaatcagtttggggatgtgttattgataaggagtgtgaggtataaagtcttcgtagcactcacaaataattgttttaagatttgcttctagatgctgaatgagatcaatgatattcttatacacaaactttgcagaaatctttctgataacagcataggttagatgtctctaaatgaatgctaaaccactatcgttattaatgaatatctatatatttttttcttttttgttgttgttgttgagacaggatctcgttctgtcacccaagctggagtgcagctcactgcagccttgaccttccaggctcaagcaatacttcctcagcctcctgagtagctgggacaataggcatatgccaccacacccagctaatacatttttaaaattattttgtagagttggggtctcactgtgtcgcccaggctggtctttcgaactcctgggctcaagtcatcctcccgccttggcctcctaaattgctggtattacagatgtgacccacacagcacccggcatccccctatatttttaaattacttaatgtggggttaagtatggttcaagaggtcagagcttgtggagaaagaggattctccttttttcctcaccaaattttatgagacatgctatgatatactttttatgctatgacattagatatcagggaatctcttctatccttgattttttctgcctaacttttctcagtgaatgatagcttcaactgaagtaatgattttacagttttgtaaaattaaaagaaaaaattaatattttacatttaatttaattatttaacattacaagaaaaaattaaggccacatttctgtttgtttgctttaatagggagagtgttgggctgaaggatacagaatgtcaaatcacttgttttcacctgtataccaaacttgcttaccaatatgggcaattgtagactatttttaatatggactaaaactgtctgcttaaacctttaaaggatatgggtagaaccttgaaagagagaatttggactacactaagtgcaattcgtacagatccaatcaatagccttatggtcaccatggcttttaggaaatattactcatttgatggccatgagttctgattatcacattctgtttaaggagaccttaatagaatagtgtcagaatatagaatgtaaacagaaagacagaatatatagaaaagagaatattgggcttattattatggctctgctatcactattttcatttccttacctccctcttcttcccaaactcctcctaacttctttacctcttgtagctcccatagaaacagctcggtcgctgaagtagcctttgagtgcctttcagcaaaatccagttcttcctcctaattcactttagccctcaactgccactttgtccctggttctctaaacattcattgttttgttttgtttttattggttccattaaaaacccacttatgcattctgggtgtcctcaggaaaaagactccctaccttgctcaggtagttcagtcttgcaattttaagccatactgatgtctcaaagatctctggccctgttttcttcctaaactctaatcccacatacccacttgcctattgattttatgtcatgatattcacccatcacttccataaccatgagattcacaagttaattcttatctaactcatcatcttttccaacactcacttctgcaaatgtaccaccatcctgcatattatcgaggacatatatctttgaagtatttttaatcccctaagtttattaaacactgattttagtacattttctgttggagcatcttctcatatatgttactcttctccatttccaccactaccaccctggttcatgttttcatcgtttaagtttatataaccattttatggagctgtcttaatccaattagatacaaagagaaaaaaaaatcctttacttttcacctgctacttactgccttaaacacactgttttggctatccttccctcaattctcaaataccccacaggaacatcttatgggtttccaattatttttagttatgagtctcactttgataattaagattcatgatcaagtattaaaaagtccattccatcaccatcaaaatattagcctcgcatctagttcaaagattctatcatttctaaagctcaggcctaattgtagcttgctcttttcttccctcttactctttctttcctattccattttatccaaatatgttccctttcaattttattacttcactgccatcactgtttgacaatcacagctctccattggcaagtgatgctttcttgggcaattgtatgtttttcttgagaggtcctcatgagaatctttgaatagccaaattccctcacacgagtgttgccctttatagctgatcacttgtggtgccaaaagagcagaacattccaaagactcttcctgctggagtctcctcatgccagaaggccactgtcctgggccatgtaccttcaagttagctcaaacctagccatcttgcaaggcatccacttggctcttgagaaactcatccatctatgccatgctatagatcaatattgtggtattctaggcttaacctttcattgcagaactgctctggccaatctctggccactagaattctctaactgagaagtaagctttatttcctatgctcatacagactgccaaatttaagagttccctgtcaagctgtcccaagatctcttcaccacattttcctccaaggacaaaaggagggaaatgtgtgttcctttttattaaaagaacatgggttttgcattttgactttttacctactacaatttataataaacatctcagtaggataattaaatattcagtgacttgacttgaaagcaaagaattaaatttgtcatattacatttatttcatctttgttaaaagtgttctgatcatttttgataaccatgatctggaataatattgaagaacttgagtgttacataaatgattgacaaaaatgaccaaatcgattagaaaaaaagcctgtgtaaacataaccagataatctagagctatttaatccataacaatttaggttaatatcttagagtgtatgaagatttcttttctctggtcaaacaaaaatgttttgaaaaaattggggaaaaatattagaatgaaatgttaaagaatagtaatgtgaacctgtcttcataaaaatttgatctgacttgtatcattttgatattcacctgtgtaaaggtaagtgatatcaaattattttccctacactcctttgtatcttcaatggtattttgtacttcaagggacaactggaagtgatgagatctggggagggtgaaatgcatctgtaatcctaactagttgggaggctgagtcagaattgcttgaggccaggatttgagtccagcctgagcaacatagcaagatcccatctctaaaaataaataaagaagaaagtgatgacaactgtgggggtggcacaatagtatgtagtagtaacagtaataaaatagtaattctgctgacaatatgacataattaaaaagaaataactacaactagaatgtctgaacacttgatgaattcatgtaccaaaatatgtgtaaagaacttccagttccaaaatgatgacatagaagcaagctggcttcactcctctccacagaaaacagaaacaaatgtacagaactgagattatcacagcaatatcccagaactcaaatatgaggacaagacagttcccaaagtcacagagaagtgaaaatctccgagcagatggtaagaaaattggactttcatatccacaatgcccatctccccaatatattcagcaccacgcttgtggaaaatattttcctgacccttgatttctgcactggaaaagtgcgattgaagtggacagtttcccgaccgtcttaggttacctggcaggagacctttacctgcctcaacccacaggaagcatcaggagtgcccgaagggctctatctctgtgaggacatccagagacaatgtggggagatgggactaccatcaccagccctggaaattctgctctgtaactcagtaaaaggagatgccaaatcagagtggctgttcagcagcaccacactgtagtagttttgctccacaggtttcctgggcaccaatcctcagccagcctcctcacactaccaggatatcccctttggaacctcccctatttgggaaaggtggtattctgatagtttactggagacaaggcaaacctggacctgaggcaccatctagtgccaaaaaggaggcagtgacccagtgaattaaaaaaaatgaaagaaaatgaacagaaaaattacaaagaatctctatgcaaacatacctaagaaaaaccaaagcaagccagagaagactgcaataaataactaatccttcaatgcaaagacatagacatatatccataagaaatggagagaagagtaatatatgagaggatgctccaaaagaaaatatactaaagttgctgtttaataaattcagggaattaaaaataattcaaagatacatatccttgataatatgcaggacggtggtgtgtttgcagacatacaacttctttaaacagggaagtaggatcttctcaagctgacaaaagcaaggaaacagtgagtgaccctaacaagatggtgataggtgaactctatgaccaagaattcaaacagttttaaggaaactcatgatcaccaagatagtacataagataaattcagacatttctcaacagatttaacaaagagattaaaatggttcaagaaattaaaaaagaaatcttggatctgagaaatacatctgctgaagtgaaaaattcattagaggctctcaatagcaaactagatcagaggaaagcatcaacaaacttgagacaggctatttgaaaatacagagaggtggggataaaagaatgaaaacaagtgaagatcacctacaaggtatatagaaaactacctgaaaagacaaaatctaggaattattggtgttcaagaggaaggtaaacaagagcaagaggtagaaagctttttaaaagaaagattaacagaaaactttgtaaaatgtaagaaacagagaaatatccagatatagaaaggtcagagaagaccagatttgattaaaataagattattccaaggcatataacaatcaaattcttaaaggtcagtgacaaagagaggatcctaaaagcagcaagagaaaagaagcaaataacatatttaaaagcttcagtttgtttggcaacagtctactcaacagaaaccatacaagctaggaggaagtgggatgacattttcaaagtgctgaaataaaaaaacaaatgccatataaaagtactgcatacaataaagctatccttcaaatatgaaagagaaatgaagtccttcccagataaaaagctgaagtaatttaccactatgagacccatcttataagaaatactaaagagagttcttcaaactgcaagacataaaaaactaatgcacagaaagaaaacatttgaaagtaaacccactgataaattaagtacacagacaaacccagaatactctaatactgtaattgcagcatgcaatccactcatcacttcagtatgaagcccaaaagacaaatttatcaaaaacaatagtaggtacagcaacgtgttaagagatagacaacataaaaatatacaaattgagacgacataaagtcaaaatatggagaaatacagttaaattttagagttttttcattgtttctttgtttttggcaaccaagtacaataaccatatgatcatttcaatagatgctgaaaaagcatttgataaaattcaatatggctttattataaagtccctcaagaaactggatatagaaggtgcatacatcaaaataaaagccatgtatgacaaacctatggctaacattgtactgaactgggaaaaaatgaaagtctttcctggaagaactggaacaagacaaggatacccacttacacttttattcaacacaatactggaaatcctggtgaggcaatttgtcaagagaagaaataaagggcatccaaatcggaaagggataagtcaaattagccttgttaacagatgacatgctcttataattagaaaacctaaagactccaccaaaaaacctgttagaactgatgaacaaatttagtaaagttgcagaatacaaactcaatgtacagaaatcaatagcagttatatacaccaacagcaagcaatctgaaaagaaatcaagaaagtggtcccattaacaatagctacaaagaatataaaatacctaggaatcaatttaactaaaggagtaaaatatctatacaagtaaaactataaaatgctgatgaaagaaattgagtaagatacaaataaatggaaagatattccatgctcttggattagaagaattaatattattaaaatgacaattttacccaaagtaatttacagattcaatgtaatacatatcaaaagaccaattacattcttcacagaaatagaaaagtatttctaaaatttatatggaaccacaaaacacccagaatagctgaagcaatctgagtaaaaaaaagacaaagctggaggcattacactaccttacttcaaaatatagcacaaacctaaagaaaccaaatcaacatggtattggcataaaaacaaacacataaaccaatggaatagaatagagaacccagatataaatccatgcatttacagacaactcatttttaacaaaggaaccaagaacttgcaatgaggaaacagtctttttaataaatggcactgggaaaactagatatccatatgcagaagaatgatagaagagacagaagagatagacccctatctcttaccgcattcaagaatcaactcaaaatggattaaatacttaagtctgagacctgaaactgtaaaaccaatagaagaaagcattggggagatgctcccagacatgatctaggcaaaggcatttgtgtaagatctcaaaaacactggcaagagaagcaaaaacagaaaaatgggattacatcaggctaaaaagcttctgcacaacaaaggaaacaatcaacaaagtgaatagacatgccatagaatgggagaaaatacttgcaaactgtctatctgacaatgaattaataactgggatatataaatagcttaaacaactcaaaagcaaaaaacaaaaacaaaacatctgattaaaaatgggaaaatgatctgaataggcatttatattgcctattgcctattcagaagacatacaaatggccaacaggtatatgaaaaaatgttcatcatcactaaagagatgagaattgcaactcaaaaccataatgaaatattatgtcacccagataaaatggctttgataaaataaaaaagcaggaaataatggatgctggtgaagatgtggagaaaggggaactctatttacactgttggtgggaatgtaaatttgtacagccactatagaatattgtatgggggttcctcatgaaactaaaaattgaactactgtataatgtagcaattcactactgggtgtatatccaaaagaaaggaaaacaatatattgaaaagacacctgtactcccatgtttattgcagtgctgttcacagtagccaaaatatgaaatcaacctaagtgcccatcatgaatgaatggataaagaaaatgtggtacatatacacaatggactcttattcagccataaaaaagacttaactcctattatttacagcaacatggatggaactggaggtcattatgttaagtaaaataagtcaggcatagaaagacaaacattgcatgttctctttcatatgtgggagataaaaaagtgaacctcatgaaggtagagagtagattggtgattaccagaggcctgagagggtcatggggagagggagaggaagaatagattgattaatggatataaatttacagtttcaatgaagagataagacctagtatttgatagatcagtaaggtgatttatagtttacaatatcttttacatatttcacaataggtagaagggaataatttaaatgttgttagcataaagaaaagacaactatttaaggtgatggatatgccagttacattgatttgctctttacaaattatatgaatgtattaaattctcacatggaccctgaaatatgtacatctattatgtattgattaaaatatatttttttaaactccaggcttccccaagattgtaatccacctgtaatttaactgactgctagtaaagcctgttactttcagaggaaaacaattcaacctagagactttgcaaagtataatccacaatgttgtgtgtatgtgggctgtgtgtgtgtgtgaaggaatgagaaaatgtaacccaaacatttgagagagaaaaaaatgtgtgtagacatggtgacttttatcagaagttgtattaaggtatcttaaatttcagttcctattactttaaaatctaaaaaaaactataacagttatttcatgaacaaatctaccaaaaaaaattcattcaaatatttgcaatctgtttatgtttatgcatgagtgcccaaaagtatcttcagctctttttctccaatatttaacatttattcctgggattgaagaatgttccttctattttactcttaaacatcaaagcaatgaaactattaatcccgctaataatgatgcatatttctcaaagatgcctttcattttcagatcagcaaccaaaggagtttcaattgtctctccagttggctctaatgagagatgtacagatgttaaacccaatactcttcttaatcattttccttcgtgtacttgattaaatcctcaaaagcaaactgttcatgttcttgccgaaaatataggcggtctcacttaacagttatgttgcacaagaaagggaagttataatggcatggaacgtgctctacgtggtattttctagactttactagttcacgagcttttgtggataagtcaaactcttgaatgtcacttaaatgtaatcttttctgtagttgattatgcagagaatacaaaaggtatctgcagaatgtggaattaattttgaaagtttgataaaaacttcagaataatagctgtggctgtacaagtcatctatgaaactgttctctcataggtgacattaatttcctatctacagagttttattactgaatgtgttatgtttgtacccccacaaaactgaaataatagttttctttttttagcagtctatgaaaatgttgaggtttatcttgactgccgctttttaacataaatatttgggcttcattgaattcctaatatgtgatgtcacttggaattctgatagggtccagtaatttggcctgcaaagacatattttaccttaaaatgaaagggatagttgaaatgttattttacacgatagcaaaaaagcatccaacataagttgtgagatttttattgcttaacttttgaaatagaaggacaaggttcttatgtgcttgctttattccaaagtatatatgggaatgctaatgctttatatgtaaaatgtacgctacacatatttgtgattagttaatttttatggctagaaattctagaatcataaaaaagaactaatcttgaatgtcagagcttcacctatttttttaaaaacaatgagaacaaaaaaatcattataatttttatatttaccttgtgtttcacaaaaaggaggttttctttgctgtgctacactgcaagaatatgtcatgttcaaatctctggggctttattaaaaactttaactactgtcttcttatagagattattaagcaaatactaaagatagcatagatgtgtggtctaggcagtatttttctggcaagtagacctaagtgcagaatttaagttctgtaacattaacctgagactaaatcattttattcagggttgtctcctctgtgaacagctttatgttatgacctcatttgctacagcaaatgaaatattaatagatcattgaaaatgcagtaaagttttgatcagatgttataccttcattgtataccaaaccctgcctctcataaaaactttctacttgggtttaaattgaaattatcactcaattttttaaaatcaaacattttctttaagaacatgacaatgtaaacatatttcttacgggaatctttaagttctatatttttcaccaaaaatcatttcagaccatgctagttaaagagttattgaaaaaaaaaagaatctatttagatgagtcaaaaaattaagcaaagtatgttttaaataagttagtgactataaaatttctcaatttgggcatttattttgactgcaagtaacaaaacacctgacaaaagagacttaagtaaatagctctagatatatagttgactcttgaacaatgcaagggttaggactgctgatccccacccagtcgaaaatctgcatataacttttgactgtcccaaaatttaactactaatagcctactgttgaccagaagccttaatgataacataaaaaactgattaaaacatagtttgcatatatatttatactatattcttaccataagtaagctaaagaaaagaaaatctcattaagaaaatcataaggaagagaaaatatatttactattcattaagtggaagtggatcatcataaaagtattcatcctcattatcattatattgagtaagctaagtaggagaagaaagaggaaaggttggccttgctgtctcataagtggcagaggtggaagaaaatctacatgtaagtggatctgcacagttcaaatttattttgttcaagagtccgctgtggatagttgttggcattggtgaaccaatgccaaatataatggcggcatctttgtgattgttttggccttttcaaataactgaaagatgattgctgaagttgtagacatcatgtttagcggaaagaaagagaaaaggagaaggtggcagctctttcaagaaagctaaaatttcctaggaacctccataggagtcccatcatggtgttcccgtggcatctctgagcagttatgtttcatatcacaactcctaggtaaagtaaggcaaaggagaagcaggttagaagtaggcattaagttgccacatgttctaattgtcaccttgtttaccaagtcatgtatgtcttatctttgcttaccaaacaaaatgctctgattttcttgattagccatagtgacacttgcttcttgtctttgaaactgaaagtaataaaccacctcacgccatgtgttattcttccaaaagctaacataattttgattgatttgaaaatatatgatttcatatataaacatatataattatatatatatattagtatctattgctgccactttttacttaagactgatagcatcaatgttaaatagtgtcttttcagaagtattgattattctctctgttgcagatctcttcaaattgattgggtgtctccacggaagccaaatggcatcattcttggatatgatctcctatggaaaacatggtatccatgcgctaaaactcaaaagttagtgcaggatcagagtgatgagctctgcaaggcagtgaggtgtcaaaaacctgaatctatctgtggacacatttgctattcttctgaagctaaggtaagtcttttctaactaatcagtgaaccatgtttttctcactcaagactccaagtgaaattattagcttctcacaccatgatgtattatgatcaatatttccactactctatgaagaagactccacggaaaagaaaggatgcttacaaaaatcactatcaccctcatgagcactttagccttcccattttttattatcttcacaagaaatataaacttattagaatagggtacatcccaaattttatttgattgagtgacttaaaattttctttacaacagatcttttcagctacaaataggtgtttgtttatatggcactgatgagtaactgtgaggaggacattttatgatttgtcagaaatattttagcattatagtcatttgtagattaatgttcatattagatgcggtttagaaatcagatcaataatacagccagacagaggagtttgtaaatgacttttattgacaaacaacacaaaatccttagtttgaaggtagaattttatataatgaaataatgttcctatttggcaacaacagcatcacacattcaatggctaaagctactactaaatttataagatttactgcaaaagaacaccataattaagaaagtgagttactgaagcaatatggatcaaaatacaaattattatggctgacacaaatttagcaggagttatcatctaagaaatgcataaagccagcagttactaactgtgcattttttgatacttagactctaaaattatcattatgcctacatttgacatcattttatgccattaagtatgcacatatttaaatacacacatctgatgaacatatttgtataaaattaaatttgggatttctgagaagaaaaatactaaaataaatttgcccattaaacatatcctccacttaagaaaaacttgggaaaatgttggcaaaatacggaattcacttctcaatttttttctttgcttctattattttaatatttattatctgttacgaagtggacaaagagagaatagttgtataggcatacgaataaatgatttaaagtttgtggagtgcagaaaacaatgtgttccatcaaagtaaaaactgattctggccagaaactgtcatagtagtttaggtgtgtataatggatttgataagtttcaaccctataactttagtggcaaaatcaaagctaagtagagtaaaactagtaaagataatgtttccatttaagtttattctaaaagatcaaaaggtggatgttcttaaaatgttcatattaaattagaatatacctgagatagggtgaagaaaaagtaatgggatgaagaaaaatattaataaagtattaacagaataatatttacctatgtttaggctaaattatttataaaattactcctacctttctttatgctgtgatttcagaaaccgctttttgtaacttttaaaaatttactgaagctttgtaccaaataagtgactggttggtgtaacattcctaaattcagtgaatgacaaagaaccggttagtttaattttaaatcaatttaaaaatgatttagacaaatctactctacaaaaaaaaaaaaatcatacgggtcaccttttatagaaaataaatgtaaattgatgaatagggaagcaaaagttaggctttagaaaacaggcgtgtgcaaatctcaccacatagtcttgaaaagaaacatcacatttggttattcttataatgcaaatgtcataccttattacactaaaacgagacacactatttaatgatgccttaaacaaagtcttatttttattgttgagcttaaagaggcaacacaggtattgcggtaaaagagaataaaggatgtcagttaaatttcaaaaaaaaaattgtaaagttcagtttgggactaggtactaatacacatttcctagcatgaaagattggagagaagtagaaaagagacttgtattgcgggtttaaaagctttttggctaaatcactgtaaacatcaatgtttcccaaaatacttaaacaagctttaccataagattacagccatggttcacaaatcccagtgaacgtaagacctgggggaattgttaaaacctaggatttcatagctctagtcccagagattctgattcagtaggtttagatttggctgtgaaaatttgcatttctaaacatgttcccaggtgtcttagttcgttttcacagtgctataaagaattacctgagactgggtaatttatgaagaaaagaggtttgactcacagttctgcagacttaacaggaagcatgactgggaggcctcaggaaacttacaatcatggcggaaggtgaaggggaagcaaggaccttcttcatgtgatggcaggagggagagagagcgaaggggagagctgccacactcttttaaaccatcaaatctcgtgagaactcactcgcctttagacctacaataaaagtctctttcctacttctctccaatctttcatgctagaaaatatatattcatacctagccccaaatgaaatttacaattttttaaatttaattaacttcttctgttgtctttcactgcaatacctgtgttgcctctttaatcccaacaataagactttgtttaaggcattattaaaattttatataataaaaaatgtatatatttaaatatatctatttttattataaaattttatataataaaagatctatatcttatgtatatatacatatgtgtatgtgtaagatataagatatacatcttatatcttttattatataaaattaaaattttatataataaaataaaagatataaaattaaaattttatataattaaatacatattatattatatagtattataatagagcacaaagcatggttgaagacttcaaaaaagctgcattctatcaaataacatttataaaattcgaatgatcctggaaaatacatttttaaaccaacgaaatatgagtaatatggtctcagatcttctatgccttacaagaaaataattatattacatgagatacagtggtataacactcttaactaaactgatatttctttaaaactgttttcaaactttcaggtttgttgtaacggagtgctctataaccccaagcctggacatcgctgttgtgaagaaaagtatatcccgtttgttctgaattctactggagtttgttgtggtggccgaatacaggaggcacaaccaaatcatcagtgctgctctgggtattacgctagaattctaccaggtgagggttatttccaggtgtactcaaaaactatgggaacctgaaaacataaacacgtggttcatgtcagtgaactatttcaaacacctccctctcaacaaaaattgaaccataaacacatagccaatggcctgctctaaatattgtttcttccttctgctttgttaaaatataagcaaggctaaatattagaaaacgagagaacagaaggaatttacaatatctactacagaaagaaataaatctggagatctggctaactccttttatcttgtggctttttttattaacatgactatatattttcactattaaatatgtgaattgctgactgttccaccccatgaagctgttccccacttcctccatttctaatctgaactacacatgcattgttcttggatagatcgcaactgcaaatttcatttgtctgagaattctaggccactggcaatattctctcatcataagtcaggcaagggaaggaagaatgctgcaaagggtagcaaactggattttttccttcatccctttttagtattagccaacttagctagccattttgctccaaatttcaactacataaaacaatgcctagtgaatataattgggaatgatgctaataataactgccatttttaaagtaccaagtctctcgcaggctctgtattgaagactttacatgggataccttatagaatcttcacaactccaggaaatttgtattatacaaggcagtttacaagtaaggaaactgttttagagaggatcaataacatatccagattcacagatgtgcatagaagtgaaagaactaaaatgtgaatataagtatgtctctcctaaatctatgctcttttgtgtactttactgcctctttaaccaaaaagcatcaacctcttttgacaatttttttaaaaggactatttaagacttctaaacttcttcattactaccactgtcagttacaatttatcctgcaaaagtaattgagaatacaaaagtaattgagaatacaaacttttttctactacttaagtttgatactgatatcttctttaaagagcaggaaatggatataggagaaagacaagaaagccaagttttttggaggccataggaaagctgaatactttgagatatctagtttagggtgaaatttatgcccaacgtctggttcctgtaaattatgttcagtataactatatccatccaaggcatgtgaaatgagacactgtctaacccagtgtctgttttgcaaaatactggagcaaatatagaaggcgtgcaatcacctgatgggttcatcttgcccattgcacagatagagccaatttaccaaaacagtggtattgcaacagagaaagagcttaataaatgcagagccagctaagcagaacaggaggttttactcaaaacagtctcccagaaaattcaaaacctagggtctgtctgggcacggtggctcatgcctgtaatcccagcactttgggaggctgaggcgggtggatcacctgaagtcgggagatcaagaccagcctggccaacatggctaaaccccatctcttgtaaaaaatacaaaaaattaactgggcgtgtggcaggctcctgtaatcccagcttctcgggaggctgaagcaggagaattgcttgaatctgggaggcagaggttgcggtgagccgagatggtgccactgcactccaacctgggcaacagagtaagactctgtctcaaaaaaaaaaaaaaaaaaaaaccctaggggtttttttggttggttttttgtttgtttttgttttttgtttgtttttttatttgtttgtttgttttgagatggagttttgctcttgttgcccaggctggagtgcaatggcgtgatctccggctcactgcaacctccacctcccaggttcaagcgattctcctgcctcagcctcccaagtagctggaattacaggcatgtgccaccacacccggctaattttgtattttcagtagagacaggctttctccatgttggtcagggtggtctcgaactcccaacctcaaatgtctgcccaccttggcctcccaaagtgctgggattacaggtgtgagacaccacacctggcccagcctagggttttttttaggatagtgcagtaggcatagggctagggaatgaggaatgcttattggttggggataaaattatagggagtcagagctgtcttcttgtccttagtcagttcctggatggggactataggatcagatgagccagtttactggtctgggtgatactagctggtccctcagaataaagagtgtgaaaaatagctggtccctcagaataaagagtgtgaaaaatacgttgaacaccaatcttaggttttacaatagtgatgttatctatggaagcagttgggaaggttaggaatcatgtggcctctggtgccatgaacacctaagccgtagttccttgtggctaatttgttaattttataaaggtgctctgccccccaagcaaggagcaagtttgtttcaggaaaggactatcatcagtgtttcgaagttaaactaaacacctctcatagttatcttggcctatgcccaggaatggacagggtagcttgtaggctagaagcaagatggaattggttaggtcacatttctttcactgtcataattttccagtgtcaggattttcttactgtcataatttttgcaaaggtggtttcaggtgtcctgattaaatactgctcaagttttctcaaggcagagaaccttcactcattatttttccttataattaatagaaaaaaaaagtttgtatagcagtgctgttatttcttattctctatcaaaaatatttcaaaattgaataagttctagtaaaccagattttccacttaagaaaaagtaaaaatatatatggaaataaggattttgtagaaaactgttaaacttcttcatactacagctcacgatgtcaacaatggatcaaatactgttaaatgctttactttctcgaagtaacttaaatttggggagttttcatgtatgattcatatctgcccttgattacaaatcattgctataaaattataattacagtgatcagatggacgttttgtgttgttcaattcctaccattcttcacaccagtagaccaagttgatcatggaactaagtaatagtgttttcatttccacatcacattaaaatttttatgttatgatttgcaacaaactattcaaactctacaaaatatcctctgtcccttaaaactaatgaaaaattcttagttacatcttcactgctgctaactcaggagactggcctgtgactttctcaatgctaacataagtagtcagattttgaaccgacagcacaatctacttttgttaggtttcaaaataaaatttaacatttttcttaaaaatgaaataactcatggaagctcagaagttgtcattgatattatataagcctttaataattaatttttagaccaaggatttaaaaaatatgtattgtctgtatgtataaatacatgtttctgcacacctaaagcattttaatatctaccaaaccattgagcatgccccaaattttgattcttttttaaatagttcatttttcatagcattagaatgcataccctggtgtcaagaaaaaaggaaaaaagcaatctcatgaaataatcaaagagtgttttgctccaatcattaatcccactgtacctaaatgaagagattattttgtgacctctgtcctcagccccgtggtctttgttagctagtttaacactggttacactgagggggaaaaaagcgcaatggtcccaaatcctgttgcatctaaatgtgatttaaatctggtcactagtctgccagttcaaggccaagatgggtataggcattttgatatttatggattagcctgaaatattggtaaatacgtactttattttttttctcatgactttcttccataacaccccataacaaacagcagaagaggaaagaatgctcatttctctcccttttttaataaatatgctaataaccccaagtaaatgttaatgtgggtcattctttgataagaataacaattaactgttagactgcatggtagtttttagagagaaaacattttcaagcctggcctgaaatagattcattttgagaggttaatgagaaggtgactgatccttgtatcttatgtctaatagcccctttttgaggaaaaaaaaatagttttattttttattgatataatccacatctttttttttttgaagacttttcttctgtcagtaactaaataagattctgagggattcagaaagacatagctaaaatatctaaaccaattaacatttattatgctcaaaagaggctttaaaaaaaagtattggctttcgccatgtagatgtgtatactatgtttcctctaagctcaccattgtcctgagtggtgtttaattaactgttgttgccctgtaccatgggatacattatcttaaagtttaccatagagggacattatgttctttgactgtgaagacaaaaaatatggcaactacatttcagacgaaatagaattattttacccaggggaagataacaaatacagtaactttactgtttacaataagctcgttgctccttcattggtctctggtagcatcatcatggaaacttttactaagttccctttttcttagagataccatattataggatcctttcaaagataattgactaagccaactgtctcctgaattctagaaattcatattttgagaaaatcctgagtatgtcttgatccggtcctggatatttaccctagagaaaagcaaatttatgtttacacaaaaacctgtacatgagggtttacagcagctgtaatcattactgccaaaacctggaaacaattcaaatgtccctaagtgagtaaatggacaaatgtggaacaaaggaatactatgtagcaataaaaaagaacaaagtattgataagtgccaagaagatatcaagcccagtgaaagaagccagtctcaaaaagctaccaactgtgagactgcatttacatgacatactatacaagacaaaccatagttttggagaaaaaagttgacaattgccaagggtaatggatgggaagggaatgtgactatacagggatagcgtgagggtgttctgtgggggtgatgaaactcttttgtatcctgatggtgtttcttcattaaaattcatggaagtgtgcacccaaaaaaactaatggtcctgaataatatttttaaatgaaatatttttaaaacactatttccattttacacataggaaaaatgggacatagaaacatgaccaagacactcagctagtcaaaataggaattttcatggttaaattttaggttgagctcctagagatggtgtgttttataataatgtgatgactgtgtatgagtgacttaatatatttttctcatatgttagtagaacagtaagatagcaaatatatttccattaaaattacaatgaacatccctatctttaaaagaaagcaaaaatgtcttagtcagtgatgactatttcaagtaatattttacatgatcacattcttatgaaagcataagttttgtgtagtgtttccgtggtttgatgctgaataattagtgaataagatattggttctggagtcaaactgcctggctccatatcccatttctttcacctcttagttgtttgaccttcattaagtaactttaggaatattagcagggtattaatgtttctgatgtccattgggctgctgagttagaatactcaaagctaaccctatcttttatatctaaatagaaaaaaaatgtttagtaattgaggagcatatgagtaaagagggctaacaggcctcctttaaatgacaaagtttctaatgaatctttccagagcaaggactcaggggtgtccactttcatcagatcatgtaaagggatagccagttcccaaaagctaagattcaaacatctaatgacctttgagatcctatgaaacaaaggatccttgttgatcctatgaggccaagcaattctctaagttgacttttagcaactagccagggaaagtcatgaagagcttccaaactttgaagagaaaaagactttccattttgcaaaatgtcacagcctagaatttaggtcctagaaaaagcattttgttctgacaaaattgacatttagagactttatgtcgattgtatgctaccactattgacaaatagagggaatcaatttttcaagtctatctggagaacgtgacagatgatcattcacatattgcacaacagttgaatcttataggggaaattaaatatcgctcagtttgtttcctattgctgctataaatcatgaccagacacttcgtggcttaaaaccacacaaacttactttatacatccaaatatcaaaagtttgaaatgggtctcattgaactaaaactaagaagttaacaagagctgcattcccttctggaggagagaatccattttcttgccttttccaccttgcagaggctgctcacattctttggcttgtggaccccttccattttccaggccagcaatgaccagttgagcctttctcacttcatattattaaacttaatcacatctgttgtcttcattcccctttgccatgtaacataacatagtcacaggttccagggattaggatgtggacatcttagggaggccatgttgtgcttaccatggtaaggtaatggttaagcagttgtgagaattaagaaagcattgtcgtaaactcttggggaataactgtcacaagtgaaacaaaaaaagatactgtgagcctgagtgcaagaatatatgaaaaaaatgctaagtatagatttgctataaattaagcagctgcctcagggagtggcagtaggatgatattagggttgggaactacagggaaatgggggagtgcaatcttgttaatgacacttaaatcttgtacaaagtggtacacaagtcttttatcattttgatagagtgaacagtgaactacaaggactggtacaggggataatggggtgttatgccaagcgaggtaactttctagaggtatgtagatacaatggaccaagttattaaatattgttctttttagtagattttgggacagtttcaagaaatgcatagccagattgatagacatctttaaggggttagcatcctgtatgaatcccacatctgagcagtttttgccccagaggatcttggagacacattcaaagtcagagatgttgataacaaaggcatcaggtaattagctggtgctaccaccaaattataggccaggcattcttctcctgggagttacagaaagagactttcaggtgcacatttaatgctggtatctcatttacaaagtggatctcttctcaacagatgcactgaagtggaattactaaacaaaaaatatgttgattcaagagaaagaaaagaaaaataaaggcagaatctgaaaattatttgatatgtgtaccgctgagacatttggttattcctagaaagggataatggaaaattagaagggtttttgatagataatatacctaccaccagtatcaatcttctatttttacaattgcatagaaatttctcactttctatgtcaagggcagttatggatagatgagagcagctactttcacagagaggtgctgttttgtcagtttgtccttttttttttttttttttgattgtgtctttctaagatacactaataaaggcaaagtaggtgttctcccagtgtcccttacaatattgaaagttgtttttgtgcagactagacatagaggtgccctcattcttggctttatctaattgcttaatcccaaaagctgttaatgtggtctgaattttttttctttttttctgagccaaagtatcttctaagtgcttagcaagctcttgtaatttagaaggaagggacaatctactgtcttatcttctgttttatgggaagttatgataccttcttcactgatctttagagtattctggaaggtggtagttaagtgatctctgaagccaggcatggatttattttttccttgtttacaggacttttttgtggtaaagtatacaccacataaaatttatcattttaaccattttttaagcacacaattcagtggcattgagtgcatttgcattgttgtacaatcattaccaccatccatctctagagctcttttatcttctcaagctcagactctgtttccattaagcactaactttccactccctgttatcttcaacccctggaaaccaccattctgtttttggtctctatgaatttgactactctaggtacctaatataattggaatcatacaatatttgtctttttgtgtctggcttatttcacttagtgcattttctttcttttttttttattatactttaagttttagggtacatgtgcacaacgtgcaggttagttacatatatatacatgtgccatgttggtatgttgcacccattaactcgtcatttaacattaggtatatctcctaatcctatccctcccccatctccccaccccacaacaggcccctgtgtgtaatgttccccttcctgtgtccatgtgttctcattgttcaattcccacctatgagtgacaacatacggtgtttggttctttgtccttgcgatagtttgccgagaatgacggtttccagcttcatccatgtccctacaaagaacatgaactcatcattttttatggctgcatagtattccatggtgtatatgtgccacattttcttaatcctgtctatcattgttggacatttgggttggttccaagtctttgctattgtgaatagtgccgcaataaacatacgtgtgcatgtgtctttatagcagcatgatttacaatcctttgagtatgtacccagtaatgggatggctgggtcaaatggtatttctagttcaagatccctgaggaatcgccacactgacttccacaatggttgaactagtttacagtcccactaacagtgtgaaagtgttcctatttctccacatcctctccagcacctgttgtttcctgactttttaatgatcgccattctaactggtgtgagatagtatctcattgtggttttgacttgcatttctctgatgcccagtgatgatgagcattttttcatgtatcttttgtctgcataaatgtcttcttttgagaagtgtctgttcatatccttcacccactttttgatggggttgtttgttttttcttgtaaatttgtttgagttcattgtagattctggatattagccctttgtcagatgagtagattgcaaaagttttctcccattctgtaggttgcctgttcactctgatggtagttttttttgctgtgcagaagctcttgagtttaattagatcccatttgtcaattttggcttttgttgccattgcttttggtgttttagacatgaagtccttgcccatgcctatgtcctgaatggtattgcctaggttttcttctagggtttttatggttttaggtctaacatttaagtctttgatccatcttgaattgatttttgtataaggtgtaaggaagggatccagtttcagctttctacatatggctagccagttttcccagcaccatttattaaatagggaatccttttcccatttcttgtttttgtcaggtttgtcaaagatcagatagttgtagatatgtggcattatttctgagggctctgttctgttcctttggtttatatctctgttttggtaccagtaccatgctgttttggttactgtagccttgtagtctagtttgaagtcaggtagcgtgatgcctccagcttttttcttttggcttaggattgacttggcagtgtgggctcttttttgggtccatatgaattttaaagtagttttttccaattctgtgaagaaagtcattggtagcttgatggggatggcattgaatctgtaaattaccttgggcggtatggccattttcgtgatattgattcttcctacccatgagcatggaatgttcttccatttgtttgtatcctcttttatttcattgagcagtgctttgtagttctccttgaagaggtccttcacatcccttgtaagttggattcctaggtattttattctctttgaagcaattgtgaatgggagttcactcatgatttggctctctacttgtctgttattggtgtataagaatgcttgtgatttttgcacattgatgttgtatcctgaggctttgctgaagttgcctatcagcttaaggagattttgggctgagatgatggggttttctagatatacaatcatgtcatctgcaaacagggacaatttgacttcctcttttcctaattgaataccttttatttccttctcctgcctggttgccctggccagaacttccaaccctatgttgaataggagtggtgagagagggcatccctgtcttgtgcccgttttcaaagggaatgcttccagtttttgcccattcagtatgatattggttgtgggtttgtcatagatagctcttattattttgagatacatcccatcaatacctaatttattgagagtttttagcatgaagcgttgttgaattttgtcaaaggccttttctgcatctattgacataatcatgtggtttttgtcgctggttctgtttatatgctggattatgtttattgatttgtgtatgttcccattcatgttgtcgtacgtgtcaggattttattcctttttaaggtcgaataatgtctcattgtatgtatataacacttttgtattcatttattcatcagcggacattggggttatttctgcctagtgactattatggttaaagctgccataaacattgatgtagaaatgtacaaatttctgttcaatctcctgttttcaattcttttgggtttatacccagaagtggaattgctggatcatatggtaattctatgtttaattttcatgttaagaactgccatactgttttgtggaacattttaacattttatattcccaacaacgcataagtgtgccaatttctccatattcttactgtttattattttatgttttttataactatcctaatgagtatcaagtggtatctcattgtggttttgatttgcatttccctacttattactaatattgagtatattttcatgtgtttattggctatttgtatgtcttctttggaaaaaagtgtctattaaagttatttgcccatttaaaaaataaggtctttgtttcatgtttttgagttatagaagttctttatacattctggatactacttccttatcagatatataattttaatatattttctcatgagttgccttttcactttgttgacagtgttctttgatgccaaaaagttattaatattaattatgatgaatccaattcatcttttttccttattgcttctgctttcagtgtcatagccaagaaatcattggcagacccaatgtcatgaaatttcccctttgctttcgtctaagaattgtaagttttagcttttacatctagatctttgatccattttgagttagttttggtatatggtataaagtaagggttcaatatcattctttggcatgtggatattcaacttttccaacattctttaaaaaaaaaaaaaggtcctttcctcattaaatggtcttggcacttttgttgaaaatcatttgcccatatatgcaagggttcatttttaggatctctgttctatcccattggtctatgtgtctgtctttgtaccagtaacacacttttgattactgtaactttgtagtaagttttgaaatcagaaagtgggagatctccaactttgttctttttcaatgttgttttgactatttgcagttttttgagattccatgtgaattttataatggcttcttctgcttctgcaaaaagcattgggattttgatagggattgaattgattctgtagatcacttgagcagtactggcaccttaacaacattaaggctcccagtccataaacatgggatgttcttccatttggttatcttctttaatttctttcaacaacattttgtagtatttcagtctttcgctttcttggtaagctcattcttaagtctttctttttttgatgttattgtaaatgaaattatcttattaattttattttcatgttgttcattcttagtgtatagaaacatacctagtttttctatgctgactttgtatcttgatactgtgctgaattgtttattagttgtaacaggttttttttttttttagaatctttatagttttctctatatgatatcatgttgtctgagaacacatagttttgcttcttccctttcaatttagatgccttttatttttttctcttgcctattgctctagccataatatccaatattatgtagaatacaagtggcaaagggtggcaaccttttcttgtttctgattttagaggaaaagttttccgtctttcactgttgagtatgacattaggtataggtttttctcatatactcttgattatgttgaagtagttttcatctattcctattttcttgagtggatttataatgaaagagattgaattttgtcaaatatttgttctacatcaactgagataatcatgtgtttcttttttttcccctttgttctattgatataatgtgttacattgattaaattttcatatattgacccatcctggtattccagggatatatcccgcttggtcatgttgcagaatcattttgatgtgcttttgaattcagtttgctagtattttgttgaagatttttgcatcaatattcatgagagctattgattttaacttttttcttgtggtttctttggtaagttgtatgtttctagtaatttgctcatttcatctagtgagatggatttttggccaataaatttggaaagaaaagatctcaaggatagctgctgagagttattgtcttattatttatactccttatatatctatgtttaattaaatattgtcccatatttttatatcattttggtaaacagtacatcttgcttttactaaacaaattttaggatatccagggctcaccaaaaggtgaactaattgagaagaagtccaggactataaatccctaaggcagtcctaaattcttcagtggatttgtgccatttcttaagaaagcttgacaagtcattaattggattatagaaatcttacctggaccatggttgaaggccataagacccatcagattggtcatcatactcacataccttataagatataatgaagagatgttgtccaggggaaaagatatgttcaagaaagaacggtagagaaaagggaagaaggtctgttgaaggtgtaggaagaagaggaggagcaggacaaaagagagaaggaagtcagggttccgaaggccacgagggaagacaaccacagtggggtcatgagatagagaagagaaatgaagcttggatttcagatccaccaagtttttattagttcttttgaaggtatccttaagggaagccatttacaaaatcttctgtcctttagagttgtctttataccaaacaaacaaacaagctaactcttggtatttagagtatttgagtcctttgattttaaggtaccaggcaaaagattatctaattctgttttttgttttttttgtttgtttgtttttgttttttagatatgcccaggctggagtgcagtgaaacaatcctggctcactgcgcactctgcctcccgcctcccgggttcaagcaattctcgtgcctcagcctctcgagtaggtgggactacaggcatgcaccaccaagcctggataatttttttatttttagtagagatggggtttcaccatgttggccaggctggtcttgaactcctggcctcaagttatccacccacctaggcctcccaaagtgttgggattacaggtgtaaagcaccacacctggtggattatcttattcttatcccaaatttcccagactgtcatgtgaagagaaatgtagtaaaattcagtgtgtgacatagcccagagaagtactagcacactgacttaaatacagtattttttacctcctctcatgtaattaaccttcccaatgggagtattttgtttggttgaacaaatatagtttggtcaaggaaattatagtcataagcaatataaatttatcaatagttggtttttgaatccactctacgttccaaaagaaaattacacagaacaaaaaagtattcctagatgtttttctataatgccacatagtccatgtcaccagacctgatggtgaggaaatagacaacatagacttacctgtaagttgccatgtgtgtatctgatctgacacacgtttatacacaaaaactttggagtcatttggaaattttgcaactccaatatgatattattctctttagtaattctgtcaatcagttgggatctgcaagatgattgtgataaaagttaattgttagtcatagcatatttttttaactgatgtaatgattattattgtcctaaattgacaggtgaagtatgctgtccagatgaacagcacaatcgggtttctgttggcattggtgattcctgctgtggcagaatgccgtactccacctcaggaaaccagatttgctgtgctgggaggcttcatgatggccatggccagaagtgctgtggcagacagattgtgagcaacgatttagagtgttgtggtggagaagaaggagtggtgtacaatcgccttccaggtaaggggcccaggtctacctttcagtagatggaggatctgagaagcagagagagtgagaaatttgccctagaaataaaacaaataagtaattaaagctcacattggttatatctaatgcaataattaggaacatattgtttaacacataacaatgtaatctcccaatttttacatgtatctcatgtatttcataaaaacgcatcaattttttttcctcttgaaaaggtcatgtcctccaaaaaaaattccacacatgaatgcattggttatgaatgaaaagaatatttcctagcaaatagtatacaaaattattataatgatattttgttataattcttttactcccttattctactgtattaagctaacactaatataaataacaataagtatcattgaatgaatactaacagacactgtgccaatattttatatattattacctcaaataatcttcacaataatcttacatgataggtactatcaattatctgcattttaaaaatgaagaaactgaagttcagacattagatattagacattatcttgctaaataccacacagtcagatccagattttgggaagcctgacatttatgttattggaggtggggcttttaaagacaagaaaattaaaatatgaagttaatgttcacagtatcttcaccaggcatagattccatctcaagaagccactttctttgctcctccctaagaagcaactcctcatctgttagttttatgattgcagcaattcagttacctcttcaggcttcacttctcattccagttctcttgctatttccactgcatctgcagttatttttcccattttgagtctaaaaccccttagtcatccatgagggttggaatcaacttcctctaaactcctgttaatgttgatattttgacttcttcccatgaatcatgaatattcttaattgcatctagaatggtgaatcctttccaggttttcaatttactttgtccagatccatcagaggaattactatctatggcagctatagccttacaaaatgtatttttaaataataaaactggaaagtcaaaatgactacttgacctatgctgtgttaataggcatgtaaacattaattttcttgtctatttccatcagagctcttgagtgaccagatgaattgtcagtgagtattaatattttaaaagaaatatcttttttctgagcagtaggtctcaataatgagcttaaaatacatagtaaaccatattgtaaacagatatgtaatcatacagcctttttgttccatttacaagcacaagcagaatagatttagcataattattaagggccctagagtttttgcagtggtcaatgagcatgggcttccacttaaagtcaccagctgctttagccccccagcaggagagtcaacctgtcctttgaaactttgaaaccaggcgttgactttttccctctacctatgaaagctctagttggcatcttcttccagtacaaggctatttcatctacaatgaagatctgttgtttagtgtagccaccttcatcagtgatcttacctaggtgttctgggtaacttgaggcagcagtttctacatcagcacttgctgcttcaccttgcacttttatgttatgaagatggctttttttcttaaacctcatgaaccaacttctgttagctttcatctattcttctgcagcttcctcatctctctcagccttcatagaattaaagagagtaagagccttgcctggactaggctttggcctaagggactattgtgactgatttgatcttctatccagaccactcaaagtgtcttcatatcagcaataaggctgtttcacttattcataagtgaatgataagtgaaatagaaatcttacctggaccacggttgaaggccataagacccacaagatttgtcatcattctcacataccttataagatataataaagagatactgtccaggggaaaagatatgttcaagaaggaatggtacagaaaagagaagaaggtctgttgaaggtgtgggaggaagaggagcattttgattttcttcaagaactgttcctttgcatgcataactgggctaactgttgggcatgagaggtctagtttttggcctgtcttggctttccacatgccttcctcaataagcttaatcattcctagcttttgatttaaagtgagagacatgagactcttcctttcacttgaacacttagaggctattgtaaggtaattaattggcctaattttaatattgctgtgcctcagagaataggaaggcctgaggagagggagaaagataaaggaacggctggtctgtgaaacagtcagaacacacaggacgctcatcaactaagctttccgtcttatatgggcaaggttcatgacacgctaaaacaattaccatagtaacatcaaaggtcattgaccacaaatataaatataaaatataaaaattaaaaatataaaaatataacaaatataataataatgaaaaagtttaaaatattgtgagaatcatcaaaatgtgacagagacacgaagcgaacacgtgctattggaaaattggcaccaatagacttcttgatgcagggtggccacaaaacttcaatttgtaaaaaaatgcagtctctgcaaagtgcagtaaatcaaagcacaataacgtgaagtaagcctgtgatactaaactactatatgcctttttaactcttattctctcctatgtgtacagcagagcttttcagatgttacatggcatgatttgcaacagatcgaatgcagactcagaaagaaaattaaattgacttctcttaactaaacatttaaaaagcttgcaaaaatataacacaatgtcattcttctattttttatttgaaaaacatttattttcataaatatgttagaatgttatagatttattattttatgtctaaatgcattaataaatatttcaaaaatttctgccgtaagttttaacacagtacatatcaacaggtaaaacccatataaacaaaaggtatttggggtcctcaataattcgtaagcgtataaaaggatcctgagaccataatttgagaaccactgcttaaagtcatagtaacgtctactagaaaattatggcaactaattagttatcctgtactatgactaaccagttgaatacctcctcctcctttagatgaagtagctaataacaggtctattaaagatagaaccaaggtggcagggagggtgcaaaagtgttacctcctgtgtactctaatacatcagagtttaaaaatgacagcaaaatatttgattttagtgtgtttgttcatctgtagctttttaaaagaattagtcaactgctatactccgtcctttgttaaatatgtattatgtagtaaccatattcaagacatcattcttggtgctttgcaagtgtaaaaatggccaagattccgtttttatcctcaagaacttacaacctaatcaaggagaaaagtgcctacaaggttatacacagaccataagagagggatgaatgcatgcatattcttaagacggagagatcactccagtcaaggtaatgaagggggttgttccattggattggaatctcaaacagtgagtatgattttggcaggtgtggcttgagctaaactgtgaaattagcaatctgcaaaacacaaataatagcgtgtgctttggtttacaggaggtatacactctgtgtaaggaagaaaggagataaatctgagtaggcaaaaggatttgaacattatttagcactcagggaagagtcaatatgatgataagaactgtagtttaagattaaatttaggtgtcagaacaaatacaatagagaaggaaagagaagtcagaacacccctggcatgaagtaaaatacatctgttctaagaagtggaatggaggttaccgtccactaggacaatggttcttaacttgttttccttttgaatcttttggaagttacaaaccctcactctgaataatagtgcatggaatatacacaaaaatttgcctgtaattttatccacccttgaactccatccatgaactcaaatttcagaatcacttctttatttactccaagatgatgtcgcatgccagtcaaacatttcttacacaaatggtgacagccctcaactcttgcgaatcaagataagctctagagtttctcatggcattctacagctctgccaactctgataatcatagtggacttaaggaataatagttttacaaaggaaaaaatatatctttttattctcttgactttctttctgcaggttgcactgaaaatagacagattccacatgtatttttcctctctctgctgccgttcactcctgtagcccctaatgactgtgaccttaatgaccttccagaatatccatatggccctttttctcctcaacctagcaacaaacagcatacctgctacataagtgtttggatctcataatatcgttcctaagcctggcctctctcgctgcctggcattgtgtgcctgccacgagaccgggctggctcgtaaaacatctctttatgtactttattacttaaactcttttatttgcctgcaggagccctttaacaaaatcacattgaattgactttctcacaccaaatcaaatctccctggtcccagttcagttgtctttgtcaatatgtattttataaatggagtgaattaacagatgctgttggaacagaagtgctggggtggcgtttatgtttttagtgctctctctgggcagatgcgttgtgtagaagtgttatacaggtatctcgggatgaaagtcatgcgtgtcatttcagtggatatgtattcttagccattttctttgaatagattttaaacctatttattactcatttttttcttagtgtttgcttatatagctttatcatttatgccattaatcttggattggacttgattatatcccttagtatgaaaaggtgaaaaattaaaacctccgtttcattcaaagaggacagatttttctattagccatgggaaactgatcatgagatgactttggaatatattgacttatttatattataaactttgtccatgcggcctttgatgtgaaactctgagttgaaattgtttcagaatacaagactgagttttcatgtcctggactctgacttcagtagaacaaatgactatcgctgtttgtttcataagatgggaatttgggaattttgcagagggaagtataattacagaagtccatggtgtaagggtggcattgaaaaaacatttccctggaagatttccataaaacagaatgattttttttttgaaaagtgtaatatatcagtgctataaaatgtatcacaatgatttggggagcatttttactctaccctctgttttgtggtggtagtcacagagccatctactggtgaagacaagtgtgaatttcttttctttcatgctctgccacaaatgttatacatttgtcctaaggatgactaatcacaaaccttttttttcttctaggcctaaaatatcccttggcttaaaatttggtccccatgaacaatctcagagtttcacaatgatttgtcatattccagactggattttactactatactatttttatctcaaaggcatgatacataattcttggtcttctttaaaaaaaagtggaatcccagttttgcagtcttaactatttagaaattcatccaacagatatgcttataaatgcttttctttttagacatagatatgaaataagcattggtaacatatttgaagtattaataatattgtgagtaaaaattttttcctccactattttctcagttgtgtccaatcaatggaaaccattggatatatatacagtttagaaagacaatatatgctttttcatctgaaaaataaacacctactagtttaatgtgtactgtaccactttactaacatctgcattttgttcaaagacacactccaccttttgtacaaatttaatgaagaggctctggaagaatggaccaatccatcaataatgcatgacctattttgtttttctttgggcatatttaaaatcgtgcattccgtgtgtcaaagttcaaaagtcaagtgctacatgtgataaattaggtaggggtcgaaagttattgcaatgcagtttcggaagattgtctgtctctgaatttgcagctcattcatgctgaagtgatgcactatgggaattactaccaaactctgctccgcaacatctgctctccctaagtgagttagtgcacgtcagacatctttatgtcagaatattgcagtgatggatgcagtcttcagaaaatgctgcataaaaatctggtgtgccgttctggccattaagtgaaattactatttaaattaatggcactgtcacagtttatctgtgcaaagaatgaacgctgattagggtattaagtaattagcaatttatcacactggaacaaggttgataataattaaagaagtaatggtttaccaaagaatctaaaaagggagtcacttcttgttatgtgagtgaaatcttggctgaaaatttcaattcagtaatacaaagatgaagctctttgtgaaagaaggcatcttttttttctagtttaaaaacagttcattatcaaaattttagttgacctgtcagaagtccctcagagtgatcagatgactgattaggagtttcaaattaggtcaatgtctgcatttttattttatacttaaagcatagtgaaaccatgaagtaatttgggaatgagagggggagaatatattccgctccctaaagggccagttttcaaattttgattgctctttaaaagagaaacatgaattgtcttcagaaaactgccagagaaaaaattaacagtaaaaaaatccatggttgtatttaaatgtctaatcagaaggggcagaaaaatgcccgaacaatataaaacttgaagctacggatttttctttttagtttatgtgtgtgtgtacactcatgtatgtatatatttatatgtatttgtgtgtgtatatatacacatacatatgcatacatacatagctacacacacataaatatgtgtatttgggtatgtacttatacatacacacatatatacccaccataatccagactcagactaaaatgagccctgctctttgtattaatttgagataacttttcctagaaatgttaaaaccactaaaattataaatatagcagttaatttgtaaaccaattacttcgaagagttatcacattagataaacatggtatgccaaagctctgttagaatcagtgtatatcattaatcataaataagagtttttaatattagagacttttgtaagtaaaaagatgaatgagagggttctttggagtcatgtgtggataaacatctttcttaaggcatgtgccaaaccaatgtctactttcaatgattttttttaaaagcacttttgatcttttatttgagtgtctttaataatgtagatgtttacacaggaccagattaaacaattcaggaccccagggcactttgaatttgaggttctttatgttatcagtcggaactaataataaacaaacaaaattccaattaaaataaatcattcatcacattgtgctgctatataactggatataaattctaatataaaaacactgtgacatgcagtatagccaccttgatttctagcttgatctgtctctagagtagtgttaatttattcctgctttaatgttaaaatttctgccatttctctttgatggcaatatctaaatgatgcaaatgcaggtaattaaactaaatttggtgggagaaaatgtctatttggtatctcaggtacgtgtgtctttcgtttagatgtggggatcagtgatcctctctacaaggtctttctgcggctgcccccagcctgtcacctgtgtctgtgatgggtctagaacagagtgaggctcaaaaaatagtggctgattagtgcacctgatcagtgaacatgctcagctgattatgaataaataccaaatccatctcatgcagaaaacatggttaccattgcagctaaattcacaagaaacaaatatttgtaccctaaataaagctaagccaaaacttgcactgcttctcccgcagggcttccagttctaggatggtgctacctttccactctgcctgggcttttatcccagagtacttgggtgaccttttctcccttatgaatttctagagctttctcagagtccctatagtttaactaaccttcttctgcaacaagatgttatcatcacaaaatgcgcaggcagttttcatgacagaaatcctatctctttttatggagcatgagagaagtttggcccagctgaatgattttcgaacatttcctcttgtgtgttcttttcctaattagtgtctagtgctcttggtaagaaggaccctcactgcacatttaaatcaccttggtagggaaatgctaccttaggtattgcaccatttcagcaactgcctgagcctgacatttttataccaaactttatagcagcctcagttttcttccctttttctatttcatattcatatataacattttattgttgcaggtatgttctgttgtgggcaggattatgtgaatatgtcagataccatatgctgctcagcttccagtggagagtctaaagcacatattaaaaagaatgacccggtgccagtaaaatgctgtgagactgaacttattccaaagagccagaaatgctgtaatggagttggatataatcctttgaaatatgtttgctctgacaagatttcaactggaatgatgatgaaggtaattgatagaaaagctctcggaggcgctgatttgacaatggaaagagaaatacattgttcataactatttttctaaaataggaatataaaaactcctgtgtgcattattcattttcacattacatccatattaataccgaatgagttcgctatgattgatgttattgcaatgaattctaaaggaattaataatgattagctgttctcagggaagctttacccagcacttcagattagtgcaggactgaaagtctgtgtgccactgaaagagccagcacaggtcgtctggggcctctgcatggtgccatttcatgcctgggagcactgtggatggaggcaggaggaaattcccgcttcttctccctagcccgccagccatcatccaccactttcctttgatagagaccttagatccagcaaattcgcttagttgcatttatatcatattcccttggacaatgcaagatgagcaaatgcctgtgtcaaaagtgaatgaataggcttctgggtgtaatcgcttatgtttttgtatggtgatggtttgtacacagccatgtcatgtatgtgggtattaaacttgacccaggataccagaagcctatcaatttaaggaaaggaccatggacactttaaaaataaacatgctaccgtgttctgtagtaatttgtcattataagaccactaaaaatgggtgtcttggtcacagacaatggaaggacgcttgttcaatgaggcaactacacagtccttgtgtagaccacatacactttgtacactttgggatgtaaaataactcatgagattgttagaagccctgcaagcactttgtatcaatgaatgattaagataacacataaggttggttaaattattctaatgaggacaatatttctccatgctgaatcaagtagtgtgtatacataataatgttcagtctgtaggtttcattttgttttctgaagacctaccacctggagacatttatatcctgttccagtctggaatggatcaccatgggatttttacatagctggcccattcggtcttccctaagctatcaattcaggaattccttttacctctttcctgtgttgattcccctgtttttttgttttgttttgttttgttttgttttgttttggattccaagtttcattccatttggagaattatcttcttgtatatagatgtatggagggtaaattttttaaaagcttaatgtataaaaatactattattttaccctccaacaggattgatagtttggtctgatatacaattccaggttaaaaattatgtctactcagaattttgaggcatttctgcatgttttaagcttccattaatattttgattcctatctctctgttggtaaccatgtttcttttcctatgaaagctcttgaagatgttctctttatcctgctcctctaaaatttcatgacaatgaacctctatgtggaagttaggatggtttctttttgcattttgttttccatttttgtgatgagagcatttaggatctactctcttagcaattttttttttacattacaattcattatgagttaggcagttgtcttccaagtaacatctctagaaccgaagccccttacatcttgtgatgcttcatgcagcccttggatcataatggaaaaggcgcaagaggggacaattgcacacagacagttcctacctggatatagagtacatcctttctatgcactagtcacacagacatatctagtcaggtggcttctcctactgcagccaggtttcaacatcccatgttcccagagagaaaagggaaacatggacatcactgagcacattgcattgtctctgccacattcatctactttccagcttccaaaaaggtatgcactgtcttgtgtgtattatttttctccattttttcttagactttcaacacgtaaaccagtattttactgtcatttagttgggcttttagaggatagatagatagatatagatagatagatacacacacatacacacacacacatatatatatagtgggattctatttatgtagtgtcatcttggctcactgcaacctctacctgctaggttcaagcgattctcctccctcaacctgccaagtagctgggattacaggtgtgcgccaccaagcccagctaatttttgtttttttagtagtgacagggtttcgccatgttgatcggtctggtctcgaaatcctgacctcaagtgatccacccacctccgcctcccaaagtgttgggattatagacatgagccactgcgcccagacccactatatatttttgaatgtactattttgatcaacttggtaagaataattcaacttattttatgtaagagagaggctgaatggagatcaattttaatagcaaaaagtattctaaatacattatgctacttatgtaaaggaaaggcaaagtagatctccacattataaaactattaccttacttatagctcttgtagtgtgggatgattaagtatttaatttccttggattaaaacaaagtggtacttatcaaaaaccataaaaaatctggagatgtgtcagagaaaatgtttataagcgtaaataattataattacaatgacagttcatgaaacatttatatttttaaaaacttggatcagtaatacttctaatgggaccaacttccccaacaacacaggaagtgtaaattctcaaatatcacattctttattttctctaaaattccataggaaagtatcaaatagcaaaaataaaatatttgtagtgtgtatactaagtttaaagacttatcagttttgagtcacacaacaaaccttggtggtaaattatatgatttgagtcacacaacaaaccttggtagtaaattttgtctccatgttccccactgaagaagctgaggttttgaaaacataagtgacttgctcaaggttacagagctgggaagctgcaaaactgaaattttaatcccaatttgtgacatttcaaagtcattgttcttcctagtatacaaactgccttcatttctttttataaattttgaaatattcattcatcaagtaagtggaggaaaaatttcatttgaaagtcacaaaagcctaccctatgtatgtctaaatgaaatttttaaatacccctctctctctcacccctgccacttgactcaggaaaccaaagagtgcaggatcctctgcccagcatctatggaagccacagaacattgtggcaggtgtgacttcaactttaccagccacatttgcactgtgataagagggtctcacaattccacagggaaggcatcaattgaagaaatgtgttcatctgccgaagaaaccattcatacagggagtgtaaacacgtactcttacacaggtaacagaaagcaagctgtctgcccatggcttaatggggttagtgagaagctgctgaaaatgcagatttatttcactctgacatcaactctccttaaactgatatcagtacattccatcatactttgaggccagctagttacaaggtaattaaaggcataatctggatgtattcaaagtcagtactttaaaatgtgttaaagtctatttaaacaaggttgtattccatattaaggtaaatctgtggagatatctgtgacctttactgctatatccagttaatttacaataaatccaatttcctttttcaaaagctgcaatgcagcttccactgaatgcattgaatgaatactgctatactcttaagcagaaagaaggatgaacctgtctgattaataataaaacctaacagtgctactctgaggatgaggtaaacccaagcatgacatttctccaagatggctggtcatctccaaaagaataacctttgcagttattgtaaatattaatttctatgtaccatcttggccctgctgaattagtccaaaatggttatgcttagttttggctgagctgtgtgagaaacactgttaagtttagaattatctctaaaacagttctgccatcaattaaatttgtgttattcatccatttacttaagtccctacaaaatgtgttcttgttttttgaaaaatcaagtttgtgtgtgtgtgtgtgtgtgtgtgtgtgtgtgtgtgtatcatctatcatcttgattcaatagaatccatttaagtgacataatttgagcaagctaaggttaataaacaagcaaaacattgctccattccatcatgaatcatcagtctgctttactcaaccaaggggcaataatggctaacctcaagagtgcagaaagtaaggcaggctactaagataagaggaggaagattaggaagggaagaaaggaacagagataaggttgattgaacattatttagtctcaatgttatactaggtactttaatttttttattatactttaagttctagggtacatgtgcacaacgtgcaggtttgttacatgtatacatgtgccatgttggtgtgctgcacccattaacttgtcatttacattaggtatatctctacactaggtactttaaaaccttatctcagttaccaacaaagcaatcatataaatatggtcatttaacagatgaggaaactgagggtcagatctgtaaaagttactcgccatgagaaagaaacatattcaaataatgccatcatcaaaagggacagactttgaagactccacgtggtgcaggagctcctttcagagtgctccaaatgcacttcaagctgttattccacctgaaatgtcctcctttatcatcctactcaaggcctaggtcaagattcttttcctcaatgcagtccctgtgctgctatggcacattgttcacaaagctcactagctctctcatgtgtcatatggatttggacacttgttccagctcttctattagattgaaacatccttatgaatagggcatttttgtttacctttgcctcgttatttggatttagaacactatacaaacaaaaaatatttcttggaatgaatttaattaggaaaggcctcagatagaggacaatttgtccaaccttctattgtgttcccagtcccagttatagatttaagtcatggactttcatttttaaattattgagtttccatctaagagagttctctacttttatctgccccttgtaatcaagatcaagattttgaagggcttttaataaatacttgtaatagccctctccagaagtgaatagatgtttccacctactgatataatgttatgagggcttttaaaatccatatttcagattgctttgcctgcagaaaatactacaaattgaatatgaaaaataacaaactgttctttttcatgaaagatgttcagcacacaagtggtgctatgataattccattgagaacaatttagattaagtcagactcttttagaaacttacacttgaaagctgacaataccagtgctgacaaaaatttattcatttatgcaatcatttatttatcaaaaattatttattaaatacctactaataactagtcactacattaggactagcagctatgatgacaaacaataatttttcattgagatttcaaccctatatgaagaaagaaggaagcagcaaatgagatttgaaatggtaatgtgggcttgaggatacagaataacagtcattaccaataagtagtttaatttgctgtagcagaaatgtaaaacatattgaccatctgagggtaggtagatggtctaggcaactgaatcgcacaaggtcattcaggtatccagaatccagaatggcaaccgaaggtatgcaattttctctttataaaatgatgtggaagttgtcagtgtctttctatactccttcaagtattgagatctgagtcatgtgaccactagaagctacaaagaaaactggcaaatgtggttttctaagcaggaggcctctgaccaggatggaagggagaactggggactcatggttgccatcacaggcaacaagtggcagatacccccgagcagaaaaaaatggaaaaggaagataatgctttacatttgtagagcaatctgcattttatgaagttctgccccataatttattgcattgtattttcatattagttctatacagtgggcagggaagggtttattgtaaggagatgtatataaggagaatgtctctccattaatctaagcatagagactgagaattaactccacgtccaatggagatgagcaggtggccaggcagccaaggaggaaggcctccttttctgatgctcaatctgagaaagagtcatccagaagctaacacacaaaaatacatacatacttacttaaaattcatcaaattagagacatggaaaataaatttaaataattaaactttcaagtaagtttttcaggggaaatgtgtagcattggtatttccgaagttattaaagcctaaatggaactaagactttggggacacaactgaatcacatgagtgttcatctaatacaatttttgccagtttggaaagctcagcaggcttggttttattgttttaataaagttggttggtttgtattttggttttcagttctggcttttgtggaagagggaaggaactagatagcagagtatgctttcatttttattcactaacatggtaccatgataaactaagtttcaaatcctgtatattgtaacaacattataatccatatgatttaaaattttttaagtaatattaacaaagtaacagaaagcaataatttataagttctatgatactaaaactataaaagaatgttgccaaacctgtctcatgtaggaatcaaaactacatgaatttgtgaagcactaaatcttattatacatgattccagtgcttttatttttcatttatttaatatatccctctttctctgctcagaaacagggaattctattctgtgcaattccgtatccctgcatctaataaatactttaaatgttacttatatttagaaaataaagatattagagttttatttatatacaaagcgtttagagcattaaacatttatttttaaatgtctaaagtttttgatattcacttttaatatgatggttaaaaaatgaaaataagagaaacttccctgtctattttttctctttccagatgtgaacctcaagccctacatgacatatgagtacaggatttctgcctggaacagctatgggcgaggactcagcaaagctgtgagagccagaacaaaagaagatgtgcctcaaggagtgagtccccctacgtggaccaaaatagacaatcttgaagatacaattgtcttaaactggagaaaacctatacaatcaaatggtattgagatacctttaaaatacaaataacaaaatcccataaattcataagaaaattgaaatgagtacaatctacatttaattgccctatgcatctaaccactagaaaagtatgttccgataaagggaactgtaattatgtgacaactaatcactcactttgtggtgtagtcctcgtagatttttagcctaaataagtaaaaaaatagaaatgaaagttccttgaatcccagaatatatctgagctgctttcaaaacaagcaaggcatattcagagaaggggaaagagttttaatattgaaagtaaatttgtttcatagtgaaaggaaataaacataaatgactcttatcatttatgtcaagaatccatctcctccataatagtataattaggaactgcttgagacagcaatataataggaaattaaaattaaataaagctatagtattgcatttcttccgaacactaagatttgtaagttgtttgcaaatagttaaaatgatatcacattcaaatgcagtcatttttctgcttcttttaggtcctattatttactacatccttcttcgaaatggaattgaacgttttcggggaacatcactgagcttctctgataaagagggaattcaaccatttcaggaatattcatatcagctgaaagcttgcacggttgctggctgtgccaccagtagcaaggtaagaggagtttgcctaaactctgggaaaaggggttcagtgtgaagattatctgaacatccaggttgtgactgcttttttcattgaagaaaacaatgtccctcctcaaagtggtgttaagtagcgtgttcatgtgtcacgttaactgagtgctaatacctatggctggaaggagagatcatttcaagggagatttatccaaatatcaatcttgtgttaatgaaaaacaagtgaaatcttgaagcagtaccatcttttcttccacattctttcctcaccaaccaattttaggtaatctataaatctataaaaatgtccaaatcattattcagttaaagaaagtttctatttaaatatgatatgaacaaaaattgtctgattttaaaaaatgaagagaagggcaaaaaagcctggcacggaaaacaaaattgttccaagccttctgctatagccttgtcaagaaataatgaagacctgaatttaggcagcagaggtcagaaccgagaatacagaatgatacaacagacatgggggataaaatctacaaaacttggtactcaattatatttacagaaataaaaggaaagagtcacggatattgtcaaatatctgcttgagtaatttgtggatcatggtgctattctgcaagcaaatttttaaaaaagagaaaaatgttgaaggtaaaagaataggattctgttttgttaagttttgtaaaaaatatatttaaagagaaggatcagatagcagggtggcggaagcagatagtacttggcactttatgtgaaaatatctggtcagaaaccagattgagaggtgactgaagtttctagaaagatctgtatgggaagttgaagtaatgagtataaatatggacatggaaggagaatagagagaaacaaatatggaatattgtggatgatgagcactggggaatgctaccaaatgaaaaagaaagaaaagcccacaaagaagactggaaataaacaatcaaacaatgtgggagtaaaataaagaaagggacatttcatagaagccagccttgacagaggaagcccaggaggaaacaaacttacacagagtagctctgattcttttcatatgcttaaaactttagaagagcaacatctttgcacactgtgcaagagccatccaaatgaaacattcagccacactgctcagccacagtgcaagaatgcaacattttgttcaacagacttctggaaacctttctgagtgagccaccatttagatagatagatggcagctgattggcccagtcaaaagttattagtcctagaacaattccatgctttttgcataggcacacttcatgcctgctacatgcaaagcaattgtttacaaagtgaaaaaagttaattctatgaaagaagccaatttttgtccaaaactatgttttgacaatattgactaagtaattgatttatttttttcttctgacttgtttctttctttagaaagttggtgcagacactataaagtcatcctaggtatcatgggaagagtaccgaaatgtctgcccatttattctgttcaaagcatattgtatgcaagcaagttcagatgtggcttttgctccatatttactggtgcttaaaatgtatgaaatcaggctgttaaaatgcaaagacactgatgggccatatggaagagagttatcaagagttctctagtaagacagtctgccagccagattttacttgtttaaacactgagggctgcactctgccgtcaaaattgttgttgaacctgttgtgataaatggtagtgtgagacttatgtaatatattcaaggtcagatttcattgtttaaataggttgggagggaaaaaaatgaaaaaaaagggaaatgcttctccaagcccctgctaatgatatgccaggccagacaacattttaaaacaaaagtgacattctcattgatcaggatagctagtgcactattacaataaattgctgcttaattcctacgtcttcaggtagttgcagctactacccaaggagttccggagagcatcctgccaccaagcatcacagccctaagtgcagtggctctgcatctgagctggagtgtccctgagaaatcaaacggcgtcattaaagagtaccagatcaggcaggttgggaaaggtctcatccacactgacaccactgacaggagacagcatacggtcacaggtgagaaaacaaaaaaaaaggaaatcctactggaggagtctgtcattgtggttaggggggcaaagcatcccaggggtgtgtgtttgatatatgaggtcacttcgaaaggacgtgttctcttgacatatggtcaggtcccacttatccatgctaatagaagagcccacactggcagcaatacgccacaacagcagataacttcagaaataatttatatttggccttgatatgcattatgtgaagggtttttgcatcagtattaactttttttttcaaacaaacagtaagatgcattttcattccccaaggatatactcatagttaatgggactaagatagccaagaatatactggaaggcaggggaaaatcagccagaggttaacatttgtctatcaagtggataattaatacacaggactagttgacagtggagtcattgtgactgtttgttactattaggaatgttaattaatagcaattgtgtttttttaatttattataatgtttattatcattagccttaataatatactattagtacagtacaatgatatgttagataattgctagtagtgattatgataataattaacaggttttagcttaaatgccacttctgaagggaggagaagcattttctgacttacttgctcgaataggttctctaacacaccaccacatcactttgttttatttccatcatagacctctcactgcctgatattttagtgtttgttttttgtctttttatgtctctccacacttgaatgtaggctccaagagagcaggaaccttatctacttgttcagtgttgtacctctagcacttatagtcctgaacacattaataggagctaaataaacgtttggggaagaagggaacttaatatgtgccagacgctgtcctaagcactttgagtgcactatgcaatttgattctccatcaccaacctaagatgtacagtgaattactaccttcattttacagaaaagaatactttgagaagttaagtaatttagttcattattcgagtctactgaatcatcccaaacaaccctgttaagtttaaattctaagaccatgggcaagattgtataaactttcccttttttcccattgtcagccacctccttccaagacttcctgagtggatgacctccttccattggactgcactttttgcagggggtgttgatagcacagataatgaaactcacagaaaagtgcagaaaggccttggaaaaatgtgactgatttttcctaagaagggacacaggttacacttacacagggtggcaaaataaattcatcacttttcactcttaaatgccacaattccctaacacataagcaagcattcattgacaaaatctccagtatttttccaaaagggccgtaaacctgcagaaggtgcttaatacaactcttggcctggcacattgtattccttacctcaagatcctgggctaaatcaatgatgatagtgttgaggctgggtgcggtggctcatgcctgtaatctcagcactttgggacgccgaggcagccggatcacctgaggtcaggagttcgagaccagcctggccaacatggcaaaacctcgtctctactaaaaatacaaaaatcagttgggcatggtggtgtgcatctgtaatcccagctactctggaggctgaggtaggggaatcactccaacctgggcggcagaggttgcagtgagctgagattacaccagtgcactccagcctgggcaacagaacgagactctgtctcaaaaaaaaaaaaaagataatggggttgggagaagccctcatatttgaatgatcaaaattatttcttttatcttattttacttgaagtggaaatcatcacaagtgattgaaataatggtgttttacataataaaaccttacttctatgtggtgctttatcatttaaagaaacgtttgcattttgacttctctgactctcatcacatccttgtaagagatgtttttaataatcatatctgaaagatgaagaagaaagccaacctactcagcgtatccaaggcattcactgcctgtatctgaaaggaaatcagaatatcatttcgttctcccaaaaatgaattgccagcttgcagttttccagatagtacactaagtggtctaaaataagactgctgctcttaagatcctctcacgtacagggaagactgacaagaaaagaaataactgaaaacagagctctatacaggatgcagtggtgaaaaatcaaatgagtcacttggagtaagcaatgggatgttaattacagggttttgaaaagcaagtttaggcacattaagactgtaccagcaaaggtttcacaataattgtgatataaggctaaagaaatttcttcttgtagtatctatcaacttaaccagcatcagcttcgaattgttgctactttattggtttgcattttttagaaatcagcatttatacaccaacagaccaaattcaattgtaatgttcaaaccaacaggattgatagcctcattaattataaaataattgcaaagatttttctctaaataacttcaccctaccagttcttcctttcattgacatttttaatggctatttttatgtcagagtagatttcatacatgtatcttggtgccagaaatcctattattagcataaatattttaaggttttttaatataattttaatttttacttaacagtaaaaaatcataatctggtaaaagcctttaggagtcctttgaccaatctccctgttctacttttgatttgttttaatttctatggatattgttttaaatagatttagagagtatttcacttgcccaatacagccctaaagaggggtttctttgtagaataaagaaataagtcctcattcagcaaaaccttaccaagtacagagcctcctatatgtagttctttggggacaggaatggtgctaggcattagataatcggaaacttgagatctatataatgttactcatttgcccaggaaaattcagttccacggttagctgactgaccaaatgtagtactgaagtattttatggtgtgaatgactgttttattgagttcatggaatgaactaaaataatcaaatttattttctgttccatcttaaatgtttgatggaaatgctgcctgaaccccctaggataaatgttttgattttctcatcatttccaaaagcttggcattccctaagcaacacagcactaataaagctgtagcactagtcgtcctggagcctgaaaatctaggtccttaggaatgacaggagggaaagggagcaccttgcctcggccccattgtctccatgcttatttttaattacctcaaagctttagaaacatgatcccgtaaatgctttgtgggaatagtggcgaatgcactcatcatgtgaaatccataaattgcttataatcctctcaagatgttaaaaaaagcattaagtaattgaagacaggaagtcctcggttaattatttagaggtgttatcaatgctttaagtaaactgaagcgttttctgctatctcactgagctgaataccatggggacgaaggagtagcagccatcatcttctcatattcgctaatgcaaacagcgcatggcagcttgtcaataaaagaccttttcatatcatttattactaaacacatccaccatcctgtacagaacaatttggacatcagttatggcattgtttcactttgggctacctctacattatacgtaggcctcctaatgtgagtttaggaatagaagaaaggattaactaaataattaaggccactgagaaaaaaatgaattagtcatgtcctgtttagcataacgtataataagggcctatgtgtctcttactctggaaaactattttcaaaataattaattagaaattactcatcattgcatttcatttaaaaggaaaaactcaccagcattaaattagcaaggaaagaataatttactttcgtttctcatcttcctagaagttaatgaaaactttgtgtgctaaatagaacaaaccctaacaatgctggttgtagcagaaaatgtaatactaatgttatactgaaacagataccttacacttcaccttggaaaaagagaaaacatactttaaccaccaatacaacaaaatgtagaaattctttgtaagggattttatttttagataactctgctatgtgttcccatattatctttgctctcgtagtaattatcacattttattctaatagcctttcctcttgtctctgttccacacttagtaataggtaatgctttttaagtacagagacagtagcttcctgtttgccattgtgttcctggtacctatcacagtacttaatatattcaaaaaatgtttgtcgaatgaataaatactgaatagtaaactagtatttgactacattctgttttgaatggagataaaaatgccactgtcaaacgtatctaaatcgcagacagatctggcaacaaaattgtggggtccagtgcgaaatgaaaattcaggccccttgttcagaaatcattaaaatttcaagacaatggaagcagagcatagaagtaagctcatgtgcttccaagcatggtaccgtgtttgattgcacagtcgaagcccacaaagccaaccctgatctccagcagtctggaattagctgcagtatatttctttaattaaaacagatagcaagaaaactaggatggtgataatgtcctcaaaaagctttgggagtttcttctatggttgtttgcaatgctccaggctgcattccccccagttactatgtaattactgaccaccaagcactggggacctgtgaaaatagagataagaatttgttttcttttcattttttcaactctgagaacaactaaatttgtgcctgaccaaaaaagtaaaaaaaaaaaagaaaaaaaaaagtgtggcatcaaccacttttttgtgttttaaaacctgcctattgataaaatattaaggccaaagaactataattgatagctgcctagacaatgatattttttaaaattccccttaaatcccagatattccaatgtactttgccagatactagttctgttttgtcactccagttctggccacccccttccctctgcaatgtcctcattgtctcacgtttgagcaacatcagattttgctgccacctgacatcacattttgtttttagagaagaaaagtctgcctggaaatgcagagaagaatcctcagtctagcataacactgaacttgaaagaggaaaagtatttattaaaatatttattaaaatactgtcactaaaatcaaaatatatatatcacagatataattcatattatatttttgttgttatatttattccagatatacatcaacattaagactattatttagacaccaccaaagaaaaagggtctttccttggtggtgtctaaataatagtcttaatgctgatgtatatctaaagagagtctgccaaagaagtaacttgtttaggaaaggcgtcttgggatcaggaagatattggagagaggggcctaagctatggcccagaatttcaaatgaaatatagaattaataacgcaagttagcttatagcaagtagtcagaactaaaagtcatgaagtgatcttactggcatgtgcaatgcaagagtccctttgttttgatgttttgatgttcagttcatatgaggtagcaactgaattcataaagcatgaatacagaaaatggacagtacaaatgctgctcaatgggggggaggaaattggcttgggtaagtggaatgggcagctgttgagattgtgaagaatgataccatccagaaaagatggctttagcatgtgaactcccgaaataatccttaatcaaatcctgtaaaacaaattctaatttaaaggtaccttagatgtctgtaaagtaattccatgatgcctttgtataccagttttgaacatctggattttcacagattgtcagattgatctaagtagaatgctgatatggctctatccatcacagtcaagatcaccaggggatgctggaagttcctgggaatctcagtaggcagagatgctccgaaagggatcacttagtgagatcccaggcaagtgagggcaaaaggaagcaacatcattatagttgtctgggtatatactctggggctcgttgtcttgcgccaagaaagaattcaggacacagacacatgtgggtgtgttaaggagtggaaagtttaatagaagaaaggagagaggagagcagctccttgtgagagagagagagaaagacagagagagagagagagagagacagagagagagagagagagacagagagacagagagacatccgtaaagtggggaggcagcggaccaaagcagattttacaggcaggctggagaaggcagtgtctgatttatatagggctcacagattggttcgatcaagtatgacatttacatagtgggaggggaaggctggtcaccccaccctaatcttattatgcaaatgggccttccagttgattggttccatcttgtctgagccttacagtacaagtggctgacaaggagaagggaagatggagcctccatcttgaacatgtacagtccttagttcctgcccacattcacccatgcaagcacccagcttgtttacctatgtctgcagctcgattttacatgcttgccctttgttagaaaattatttggggctttttactaaaaagaaaaggcttaccgaggactcccatacctttactatctgcctaagtgatttcttcttaactcctgtatcattagcaaggactgaatgtgagcagccgaggggccagaccacacatccagtttgggtgaactggtgccaggacagatgacttacccgcaggatggttattcacaatactttataagcaccaaacaaaaactttttaacgtaactcaggcctctcagtgcttgagctaatcactaaacatgctgatggaggaactcactgaattacacatcctttaggactatttggtaattctttagaacatagcagatgacactatagaataattggctgaatgttttgaagtagcacttgctatgtgaaattataatggctaaagtgcctttttttgactatttatcaagagattaaaaattggaagcaagctgttctttatagagtacatcaaatgttaactttcatagacatgggttttgttttccaaatcatatttttatgaactaaaggcagactttttgcagtcccttttagcacacatttactcttcaaagtaatgttacttggaagtgtaattgtaatgagtttggttatattatgcttctttcctttaaaaaagaacatgattccctgtagggaaattcaggtaatttgcagccacagtaatcttcactatactgaaatgttaaatacttggcttttctccatgtgtttgcctttctgtactctacaagtgctatttcctactcttctaattcaatgctgagcacttgaatgatgttttcttttctccttctactcttcgacttcaggattaagttacagttggaatggttcctttgagacatctctttatttccctcttctcatcctgatcaattcatgagtagttttcaattggtgtgccctttttattgcctgttgctagtatgtcatatatatctcattttaaggactaccgatagaggcttacttaaaatgacagcaaattccagttgaaatgtgttcattttattgagttttacagagtcgtatatatgaaaggtcatcaggttcatgtaaatcatctatgcctgatggtagttgatgctttcttacagattatctgaaccaagcctattagtaatccagtcctctaacaatatgaaaaatataaaaactaaaagatagaatatggttttaaattttctaaattatggatttagatattgccttcccttaaattaatctgtaggcctattaagcagtctctactatcatgcctacagtttatagatatagaaactgaggaacctagaagccagaaaacttccttgtagtctagtacttggtaagtagataagtattagaacccaaatagtctaatttcagactgctctcttagcacagaacatgactcagtatctcactacatgactcataataatattcaaaatgaaaatatttaaatatatagtcccacttgaatttttttttttttttttttttttttttttttttttttttttttttgagacggagtctcgctctgtcgcccaggctggagtgcagtggcgggatctcggctcactgcaagctccgcctcctgggttcacgccattctcctgcctcagcctcccaagtagctgggactgcaggcgcccgccactacgcccggctaattttttgtatttttagtagagacggggtttcaccgttttagccgggatggtctcgatctcctgacctcgtgatccgcccgcctcggcctcccaaagtgctgggattacaggcgtgagccactgcgcccggccgaattttttatattactggaaatttgactgggctttgagctatttatgtcatcgtttttgttataaggctgggaagcctaacccagttgctctgggccacatttctcagtgtaattgcccaagttccaaccttggcctcaccctttccttttctttctttctttttttttttaggcagtctagctactatgtcacccaggctggagcatagtggcaggatctcagctcactgcaacctctgcctcccaggttcaagcaattctccagcatcagcctcccaaacagctgggactacaggcatgcaccaccacgcctggctaatttttgtaggtttttttttttttttttttttttttagtagagacggggtttcactatgttggccaggttggtctcaaactcctgacctcaagtgatccacccgcctcgtcctcccaaagtgctgggactagaggcatgagccaccgtaccaccggtcccggccctttcttatgtctgtgatcataggtactttcctccaactttctgtgccttagcttccttatctgtataatgaacaaataatagcgtgcacagcagaaagttagtgtgggcgttaattatattaacacccatgaagtgcacagaagagggccaactagtagtacatgctcaataaacttttgctagtatgtcatttacataatcttataactaacttccttgaaaataactgcaattctcataaaatatatttagataatgtatagagtccaatgaaaagagaattaaaaacagaccaacaaaaacaaaaacaccctgagttttgtctgttgggtattttttttcttaatttatagtttttgtgctggtgtttgaactacattcttttaacttttttttttcgttttgagcaactacagtgtatacaattatgacttgccaattaaaataatattaattttaataaagagcagctgcaatggtttctaccatttttatgtcttctaaatgctgcttaatcttcagagggaaggcagccattgagtaacttaaatactgttagctctagctcttatgtgatggagaacatagagcttggtattcaggcttgggtcatctatgcactcctcagtccaggtgaagtcaacgctaaataaagtacaaagcctgatagtggacaaatgactggcttatccaaggaaaatgtgagttttgttataaaaagcaggaacagaccctggaaggtaaatatggcagatgtgaagttgcttgacacacattagcaaacatcatttgaaatgagcctaagtattactaccctttgcccacatggtccattaaactggtcagcatggctacatttcagggacagacacagctcttgaggataaagtgccaatgaattagagtaaaactgtcattctccccatattcacttgcagacatgtctcccactctcatcctcctggttcttcaatctttgtctcctttcctcagtgcaccatgttgactcctcttgatttgataatatgtttgaactcctctgacttcttgacgaaggttttctgctcagtgctgagtctgccattcctccttgattctagtaccccagtagcttcaagagaagcaaattccttccaccagccctacccccatatcctgctaggtgaacctatcccatctaatgtaaacacctgtagcaaactcctttgatgcactttcctccctctatcaaaaatccttaaggtgctggatgctctactgctgtaccatgcctaaacacctgccttctcaaattctaggctgtaagtaaaatggagaccactcaacttgcagcagaaaggctttgtcaagaaatgacaatttatatttttatatacattaattttcctttcagctacgattctcattacaaatacgcttaatcctctaatcaaccttagcaaacctctgtgattatgaattttcttttttccctaatgcccatcctaaaattttatttaacagtcactgcatgtctgaaatcagaccagccacgaccacaatgaggaagataactgaggccattgttttgctcagaatattcgagaaaaaaatttaaatatctgtttacttttagctaccatatttacatctggcattcaggaaaaaatctagaatatgtgtattgcccacaaattatattagtttctgttattttattaatattctgcaactaaaaaatatctccaactcaatgaaatcattgctgtggacagggataccgatggaattatgaggaaggacctttttggtcaggtcacatggtgataaacatcgtagcctcatatccctgcaatccttatgggacactatgatgggcatgctcttctttaagcaatatttgttcaacattgaatgcctaaaaatgggcactataggggaaagtgacctcccaaaaagactcgctcagtgatgccatttctactctcaaagggcttatattctaaatggggaaaataagatattcaggtaaaatggtatcacactggtcaagacccctttttgtcggtaaagagaatgaaggggagacattgtcgagctaaacgagtttgccactgcaacctctgagtttcattcttgaatgttcccttccattattttgagctttacattttgtaatcatagcattttccgatgagcttttatcaaacatatgtggcttgggtacggcttagatctttagtcatattcttcatctgtaaatcaggtaaatatcaaaattatgtaaatcctccaaagcaaccaaatggaagattgtaatcaaataagtgcctgcatcttatcactaagttgataaaaaaaatacaaagggctctgaagctaaaccttggagcagctccagctgcagaacattattgctttagcagagaacccagactactgctctcattctaaatggatgagatgggtaattttttcattcgtttaacgaacacacactttgtgcctgtcacaatcctaaggatacagataggcaaaacaaagttgttgttctttcagagcatacatctaaagcaggagacaaatatcaaataagcaagagacacagcaaacatcagagacggttgaaggctctgaaataagaaaattatgtgaggggataaaaagggatgggtggattgtttagataaagtggtcaaaattttttaaaatgtagtatttgaggagaaatctgcataaatagacaaagtgacacattaacatctctgaaggaacagtcattccaccaaaagaacaaaatatgcgaaaatgtagctcaaaatacgtgaaaaaataagcataacaatcattggattcatctgtaacttagttcaattatttaacaaataggctcagtcctgttgttttaaaatactatttttttctcaaagagagctttggcattgtttgaactttcccaagagtcaagagagagatgtcttgtaagcctcaatatcctccttgttgaatgctgctgagctttaaagttgcttctgctagaatgaaatactactttgagtatcctatttcatcttctcttgtctgctagatgctataatgattccccattttacagatcagtagaccaaggcaaagagaagctaagtaactctaacaaggtcaccagccacgcacagagcagcgaaatctaacaatatacaacttctattttagatggattgtcattcttttctccctgaaaacttactgaacaattaccatactgcatcatattctgaatacgaaagaagtaataagcaccatctcttctccaaattagctttaatctatgtgtaaagacaaaatcaacacacctcaaaaaagggcgcattagatacagtgcaaggtttaaaaacaaaagtgttggttagcgttaatatgagttgaatatggcttggggcaagaaaatgttggatctaaccttctttttattttcctgcccgtatttatataagaagcaattgcagagactgggatggttagcctggagaagagaagactcaggggggatttgataactgtctacaaacatttgaagagctgtcatgtggaaaagaaattagatttgttctatatgtccccaggggtgaaagtgatagaaagatttcatcacaatataaggaaggactttcaaacaaaataaggataactctaaggctctctaaagatgtaatgggctctttgagagacggagtgctctgatccgataggcaggacagccttttcaatgacatcttgtatagggaatcaagagaagggtggatggttcacatgaattttaaggtcttttctatggctgagaatttattagtttatcagtgataaatgaaattttgcccaatacttagcctcttatgaggttcagaccttctttaaagagtgttttagagagtactcttaaatgttttggctatcatatctacaactctgcatgttacttctggtacttaattgataataaataatcctcttaaggtgcactttatttcttgcttgctttttctaggtctccagccatacaccaactacagcttcactcttacagcttgtacatctgctgggtgcacttcaagcgagccttttctaggtcagacactgcaggcagctcctgaaggtaatgaaacaatatccatggtttgagggaagaaattttcacatagcattttgaggtggaatctgtaaactccttcataacaaataaggaagaggcaataaagttgataggtacaaaataaaatagcattctaggttcccattcttcaggcttgattcatgtaggtgtagcttcccaaggtcagttcgctttcaattctttaacctttatagagttgattttctgtggaaagaagaattattgaaatttttcaaaaactcagatgttaaatattttgggagcatctaatatataataagcaccatgctcactgctgaagttgtttaaaatgttctctgccctcaagactgacaatcaagtagaagtgataggagaaagatctgtatgaagagagaaaatctgaaagttgatgttaagaaagaacaaatgaatagagtgctaaggttggcctgaagaggaagagatagaaacccatcgatgacatcaaaaaaggctttatggagcagatgacttctgagatggaccacaacaaacaaggattttgacaaatgaacagtgatgtacagagatgtacaaccagacacagttggaaggaatgtaagatggaatcatcaccttagaaggcaaattgcaaatgtctatcacatttaaattgttaatttcccatgatacagctgttctattttcatcatttatgccagaaactgtgccacactgctcaaggaggcatgcaccaggatgtttattgaagcatttattttgtttaatagcaaaatgttgggagcaattttaatgtttgtgagtagaattgctaaataaattcagctattctcatattgtggaattccatgcaccagtataaaagaatgagatgatcagttcatacaaagaggaagttatgacattatattaatttataagaacaaactgagaaaatggcatttattgttaatggttaataaataaatgcatttaaaaatccaggaagtatacacaccaactgatagcaatggttacccatgtgttcagaggtgggatggctggtgtcatttactttcaaaagaaaaatatactcagtggcatgtgttagtgatcaactaattattttgttaatcttcattatctgcctatttttcatatggggaaaccaaggcataaataagtttctaaacagaaatgcaatgttaattaccaccatagactcctgaactacttgtccattactcttctaatgaaatggattgttgtacctcggaatattagacctgaacttcctaccagtaaatggggaataaaatggaaaattccacatatggggcatatggctcctcaccaggaattcactaatgatgttttctatataaagaatgtttcatgtcaaaaagcttagtgttcctttgaaaggaagaaaccagcagtggattttttggaaaggtaaactatcaaatggatactttgatgataatggataatttctaaaggatctatcaaccagatttggctgaaactcaacctgataaaataacagaatctcttgttccatttctctctaccaaattcatatatttaaattcattggaaatatgaaattttcccaacaaaatttcttgaaatgacttacattttatgacttaaaaattgtagctttcaacagtgcagggtaatgtgatatgagaaatgcccttgatttcttttttttttttaactttatgtatctttcctctaacacaaataatcatgcaaagaaataatagatgaaatggactttcctctgcagaagaaacatggatttagggccattttctggctgaataagtgccatttatatataacccatatatgaaataaatatagtgtgaatgcttaacttgggaacaccttagcaatcacattaagttctgttgttttactgtaaagtgaaaacaagtataccactttagattatccacccagacataactaattataaaatgccattttcgaagtacatcagatataatttgaagatctcatatttgagtattttaagtggacatggaaagaattaaaagaagtgtttatgcatagccaacgcaagctgagctcttttcacttgcctctcattttcaatctaagaaaaagtcaatgtacattacaacctcattgacaagttggacacagttctctacagttttatcctcatagaaaactgtgtacctgtacctttagtcaaataacaggaagattttgaattgaattattactctttttttctacaattactgccatccatgtgagttctaattcattttagagataaatcatgcaaaattgcagacatactttcctctagcattgataatgtggaaacagaaaggaaaagaagacccagtctttttcagttcattccagattcctcttcctctgcccttcttttaacgtttacacacccttggttttttcctctactctttacactatagcacccaggctcttctggaattttcgagtactggctttatctcctaatgaaggctgagagctaccaaatactaaagctctcaccaaagctacacttatggatttaaatcctatgtatttactggtctactacatgtttatatttaggtgtttttcaaaaactttaacctcagtacttcgccacttaattcttccactccactctactcctcaacttgcttttcttctctcaaatactaccacctacctatcacctaagcccaaagcttgacactcttgatggctcccttttccatatgtaatacataattttttataaaatctaattagttttaaatcttaagaattttttttaaaaaaattgttcttctttcccgtcccttttaacactgccttagttcagatcctcatagctataagaagagaagttctctggatcctcctaactaggatcccttcctctagtcatttttcctctttctcacatcccacatcctgattctttttcctcttttgacaaaataagaatatgtcatattattcacctccataaagtcccatttccttccaggaagacatacatccatatctccttagcaaagcaacatggacccctcaagttttaacttccatcaatttttcaaggctttccatcttccccacatgccatgcagtgcaccagccatgccaaggtatgtgcagtcctgccatccttgcccacatttctacgactttatgtgggttcccctcagcctgaactccctttccctacatcctcactcagttaacgctcaccttttcaaaacttggttcacgcatctccccttctggaaatcttccactacaaccacctacttcctacccatctccacttctccccacagtctgtgtcaggttaccctttctaagtgttctaacagctactgtgcctccttctcttaaagcatgtatcatactggagtacaactttttatcgactcatctttattcaccatgatacatgaactccatgaaggataagaaaaagtctttatcttcccatccacagtgcccaacacagaaaatgacacaaagtcgggtagaatgttgagtgaataaattaacaaatactaaattgtccagaattcagtgcatccctgacatcagctaatacaaaatttgttcctatcaccagatttcaggagaaaaacaatccacaataaatgctgggaattttgaattggaatgaagatttgtagggacatgagaagtgggtaatatggcatgcaactcaagataaatttaaaacaaatacagtagacatgttctacttgttgtcactgtgtaaaaaggcccaccaaggtttaattctacctttccccttttaaccttgcagctagtttaccccaccccatcctcctaggttacttccctccctactattcatttctttcacttgaactgcctcagtttgctcccttattatatagaataggtttttctggtttcacctgagacttaggccagagttacatggtgaaggggacaaattccccacctcggactcattaatatatctcaccaaagattgtcttactctagcaaagatttcttgcagctgccaagataacgatgtccccatatcaccatccaagtaaaaatgcagcactttctagttatatatacatttgaactccatattatcaatcaaaccaatgggcatggagttattaccaacttgaaaagagcttttgccagccggtataaataataaactcaacttttacctaaaggttgaaacaaacccaaaattatgtttcattttattttattagctcctccacatccacaggctttattgactggttcaaatcagaaaccaagcaatagccattctagtaccttggtgatttttaatacatcgttcaaggtgaaaaagatataactgcaggaagcagattatgaattaagattttatactttatcttttgaatcaacaaattaatatcacatttaaatcaaaactctgattggttgaatcatctagcagctgttggcagagaaacccacatacaaatgtgtactatgatttgtgaattttaccaaatatctagaacagagcagactctcagaacaaaatgaactactttcttctcaggaatatattgctccttagaaagttgggatgtttgagacatttttgaaatctatcttgtttctttcaggatgctgctaaataaattgcattttgttcttctgaaaatttttcttctaaaagtgtcaaaatcttaacctgtacggagtaacttacacaggagatacaatcaagcaaaagctattgattacagggaacctaatattgaaatgagttttttttaatctccagaagagatttacagtgtctaatcagagtataactagatgacaacataaagtggtaggactgaactttctcactgctggcttctccatcgatggatttgtacatctataagagtacttgaatgtttgacattgaattacagttgtttgtgtgtatattttattttttagacagaagtataaactccttgaaagtgagccacatcttagtcatctttgcattccctagaactgcctgcagtgcttagcataacattttgcaggagatatatttacaataaatctactcattaaacatgtattaggcattgtgttatccatagagatacattgacgaataagacagagaagatccctgctaccatggaactaactttgcatcaaagtaagagaaaggagaggactgcaccatcatataatgtaaaaataatagtatgtcaaagaaagaatttgattatgatgtcttgagtgttaagaaggaaatagaaaaggccatgcgatacagagaaactaggttgggactccattagatggggttcaagttagagttaagagagtgctaaaatgaggccttatcaataaggtgatagttacacaagtaactgaactatgagaacatatgagaacattctacatataagaacaattctacatatgagaacaaaatgcaaaaatgtcatgctgtaagggaacaaaggtgttccaggccaaaggaaccgaagttcaaaagcccaggtgtaggaaataactagaagcattctagggatagaaaggaatctggtatggccacagctctgtgaatggtgcaaagaatgctgccacttaggccagagccaataaaatgtgggaccatatgggtcacaaaaagaaattgggattatattatatgaataaattcaaaagggttatatggttcataaagatgacactggcttacatattcactttatacacttttacaaagattccaatggaatatggaaggccaagatttcgacatggaggcaagtttagaagctatgacaggagtttatgagagagagaaacgtggcttggaccaggagaagtgaaagtaaagatacaggaaagtatacattatagaatcttctgggctttatgttagattacatttgggcgtatgaaaggtgaaagtctcagggatcattatttttgtgtgttttgtccaagaaaatggatagatggacaagattgggaggtacatagattgtagacaggaaaaacaagagttctgttttgcatgtttttagtttttgatatatcatcagtcatccaaatggaggtgtcaagcaaacagttggattcttgagtctcacactcagagtttcaatctagagatatgcctttgggggtcttcagcatatgcatatttaaaacccatactgaatgaagatcacctgggaagccggtgttggaagagaagagaagagagaaaaagaagaagagaaaggaagagagaaaagcagaggggagagagagaacagagcatactgctctgaggcattacatcctttcaaggtccaggaggggaagagatcccagtaaatgaggccagaggcatagccagagaggaaaagagaagcatcacactgatgtgcaagaagaagggaaagtgcactcatttgttgaattgtataattcaggtacatactcgattatgcttactttcacatattccaggtaaattgtattaaaaagtttgaaatccccagatgatctctcaggccttgatttaaaatactctcagagtgacaaccaaggcagagaaattatccactgctagttgtctgacattcactttccaaaggcaattcaaaaataaaataatcaaagtaataaaaatatatttacaccaattatgtatttttgttccatacagttagatattttttaaaatcaacagaaaaaatatcacagttcatgggggggatggtgtgacttttgatacactgtttattttctcctaacaataaaacctcattgcgttattcttgccaggagtttgggtgacacctcgacacattatcatcaattctacaacagtggaattatattggagtctgccagaaaagcccaatggcctcgtttctcaatatcaattgagtcgtaatggaaacttgcttttcctgggtggcagtgaggagcagaatttcactgataaaaacctggagcccaatagcaggtaaactaaaagaaaactttaccaatcatacagcaggatttgtacatttctctgggttgataagaaatgcatgtcccactgaaagttgttaaattgtttaattaacttcctcattcattggccattcaataactgatgaaagtgctaaatcattcagtctttagacttcacgaaatttcttaaaaatataaataattcgtcttctgtttgacataaaagcatgagaatttttaaatatacaaaatacatgaagtattaaactttaaaaattaccaaattatcttcaaaaacacgcatccttgaactagcaataaaagagatgtaaagagttttgttttccgtcaactctcttttcttcttgtacagtgtttctctacttgctacaccacatatagttgtgaatagttttagaggaaaaagttccacatatttgcatttcattcccattcatttctcagcagagacaaaaacatatcttaaatcaacagatgttttactgtagaaagtagagatcaatttcattttattgtaaggaatagcagatcaatttaaaaacatctttctctaaacatatttccctgaactccaacctatttaaaaatggggaagattaatttgaatcctccacaatccaccagcacactccaagactttcctgaaatcttcaagaaaagctatgaattactagcaggttaaaaataaatttaagagcagctgaaattacaatggcttggagacaatgttgcctgtgcaagaaaaactaccaagtcaagtttctggaaagggggcaaagagtttgcaatttgtcacaaatttaggactaagcaattgatacaaaaactagtaatcattgttcaagtctcttgtgcatggccttaccacaattcttctttctttttaaatatagatacacttacaagttagaagtcaaaactggaggtggcagcagtgctagtgatgattacattgttcaaacacctatgtcaacaccagaagaaatctatcctccatataatatcacagtaattgggccttattctatatttgtagcttggataccaccaggtaaaaaaaaaaaagaagtatgtgtgtgtgtgtgtaaacattttaaaggaattaattagagataagaatagaactgttaatttagtaaatcagaaagacatagtcggtctcctggataaatatgaacagaaaaatctaaaccacacttctaagtgtatagacgcatgagtacatacatacatacgtagagatataggtatctagatgtcgatgtagatatgtaagtatatacagctttctatgaaagcaacactttcaagtacaagagactaaaaatctttttactcatctattttttttttttttttgagacggagtttcactcttgttgcccaggctggggtgcaatggcgcaatctcagctcaccacaacctccgactcctgggttcaaacaaatctcctgcctcaggctcctgagtagctgggattacaagcatatgccaccatgcccggctaattttgtattgtttttagtagagacagtgtttctccatgttggtcaggctggtctcgaactccagacctcaggtaattcacccgcctcagcctcccaaagtgctgggattacaggcatgagccaccacgcccggcttactcttctatatatccaatgcaagtcatataggtcagaattaccttgaacattcatttccatgggactccttagattggatcattgacattataccattccttttatattaaatcagtgaatggggagtttggaaagacagttgttcacttcacccatgtaccttgggttgtgaccacttatggtagctgcatttttcctctgtaagctgaatagccttcattgagccatttagtcattattgggttgccttgtgacttagtgcaacattatattttgaggtaagcaccatcctcaggtaaaatcctgactgcattaatactgtggagtaaagagtagagtgagaaaggacatatggaggacttttctttccaagtaaaatttaaaaatggttaagatgttaaaaacacttcaaaattatgtgactttatttttaatatctagtcttaagatgaaattgtgacacgccctttttgtcgccatcagaataagtttagccacagttcaaagtggcaccaaatggttaacagccatttgagccatcggtagatccattccataacataattaacataagcctatttttattgaattgaacagtcaaaacaggtactattgtatagctataaagagagcgtaaagacctaatacataaaacttaagtttcttatagaccaacaccttctgctataatctaagatcaaagagaaaaagttattttcccctaaaattcaaaagaaagtttacaaagagctttataagcaaagaaaaatataagttgctctaagatattaaatgtacatgatttcacccacttttgtttaaaataaatgtgcagcatattaaacaaaatataaaggaataattagtagtggcagaatgcatcacaaagtgctataatctttatgttgtaagagcatagatattcttgaactctgttcttaatttcgatagaggaaaagacatatcttctgctgtgggaaatatataaatttacagccccctttacagaatttatttctacttttgtttaattttatttatttatttatttatttatttgtttgtttgtttgtttgtttattttgagaccgggtctctctctctgtcacccaggctggagtgcagtggtgcaatctcagctcacagcaacctccgcctcccaggttcaagcctcagcctccaaagtagctgggactacaggcacacaccaccatgcctggctaatttttgtatttttagtagaaatggggcttcaccatgctggccaggctcgtctcgaactcctgacttcatgatccgcccaccttggcctcccaaagtgctgggattacgggcatgagccactgcacctggccacgattttttagtatatttctccttggcatttttattgtgctgttgtgtttttgcaccacaaaataaaatgaagctggatagagccaatctaataccatatttagcctattgacaagaaagttttagatttagaccagggtcttctacaatccaaattctccaagagcaatacgggaaatttcagggtgatgagcaaggttgatgatttctttgccatatgactgggaagtcccatggtttatcaaaatatctgttattttaacattatttaacatatcagttgccattgctaatctgaagacttcatgttcagtacgaatttgaaaatatctttattttatgactatgcaagtaagagaaatgaaaaagcctggattcatatcccaatactgccacctattagctgaacttaaacggtctctaggcctcaattttctccatctgtgaagtggagataatgatgatacctacatgtaggcaggtagggttgctgtaaagatcaaatgaagtaatttatatgataaatatattatctagttctatataatattctatagataccaatggtgattgtttgaagaattatttttttatctttaattgctcatttttaaaacgtatttgttccaacatttgctgggtctcaaagccccaattttcaaaataataaaaccacctactgaggattggattagtaaattttcaagacctctttcaaatttcccagcgtgtcatttttttctttgaattcaatatcacacttaaatgtttaatgtatcatgtttccatttagaaatgtatcattgtggaataaaacacaactttcacttgtttaatatgaccttaactctcacatacctcaggctttgtataaattgttcattctggtccagcctaggggatattgtagaatgctttacacactaactctgaccatttaaccaatggttaataaatctataatattcagacctgtcaatcttatagtttaagatgcacagaatccatttcagaaaccatataatataaggaaagattaaaatcttcaattaaatctttttcctggtgtctagaaggatttcaaactcagtaaacagtcagatgattttgacttgtgtataatctacagttgattttattggaaagtacctcatgctgtgttttgatttggataataaaaacatgtttctattcctgaatagtcacaaatatatatattttaaacagaaagaaaataaatttgtaagtggagattgtttatttgctcacaatataaagagttttctaggtattcatcatactccctgccattacaaaatgactacatcacagacagagctgaataatgggcaaaacagtccatgcctgcagttcccaaacctgaatgagcattagaatcacctaggaagcttgtgtaaagacagattctcaaccccaaatttactgaataagaatctcctgggatggagtcaagaaatctagagctttttaaaaactccacatatgactttgatgtgctaccaagtgtttttgaaatagtagcccagaggaccaaggaacagatctaggtattgctgaaaccaaatgattctgggagaacaatgtttgactgggtgtgtagtggcgtgccaagactagaagagttaattgtggaaaatggcaagccgctgaagggaaaacagccacgtgacagcaatgatctctgcagcatgaagaaactagtaactagaaagctttacctacccatccaaaaatctaaaaggaatagatgtgatttaccaaaaacatggatcacactcaccaagtgagactggtgaattacaataactgttttctctgaaaacatgagtccgccagtttctcttgaatgtctaaagcaagcttatccaacctaaagcccaggatggctttgaatgccacccaacataaattcaaaaactttcttgggatctttgcaattatttgttttagctcatcagctattgttagtgttagtgtgttttatatgtggcccaagacaattaatcttctttcattgtggcccagggaagccaaaagattggacactcatggtctaaagccaaaatactggctaaattgtatttgtttttttaaatatgcatttttttttttgtggtcagtgtgaacagagtaaccttagacaggtaagctgctgggaaaaaaaatgtctatgtggttacttggcaactgaaaaattacctaagcaattaactgaattttcagttttcaaactattgttctaatgctataaataaactaagccttagtacatgtttataagtcctactagtgaaagggtaaggtctagggaatagtgacaatacccaggggaagagtacccgtgatactgataacaaatgtcgtgtacatacgttcatattacttggtgtatttgccatttgttaaattcctactatatgccaaacactgataagctccttctctgccttacctcagttaatttttatgcaaacgctagaagacaggtaataatatcattatccccatcttaagataagaaattcgaatctcaaaaaagtaatataatatgctcaaggtcacactgcagagccaggattcaaattcaggtctactgtctgctactgccttttaagaccagttcctttctgtctttggcttaacccttaaatccaaatcgacttttcatttcttgaccaaagtctctcagatttatgatggatcaactatgatgtttgaaatagtagcccagagggccaagaaacagagctgggtgttggtgaaaaccaaatgattctgggagaatatttttttttaattttttttcttttattatactttaagttttagggtacatgtgcacaacgtgcaggtttgttacatatgtatacatgtgccatgttggtgtgctgcacccattaactcgtcatttaacattaggtatatctcctaatgctatccctcccctctcccccaaccccacaacaggccccggtatgtgatgttccccttcctgtgtccatgtgttctcattgttcaattcccacctatgagtgagaacatgtggtgtttggttttttgtccttgtgatagtttgccgagaatgatggtttccaccttcatctgtgtccccacaaaggacatgaactcatcattttttatggctgcatagtattccatggtgtatatgtgccacattttcttaatcctgtctatcattgttggacatttgggttggttccaagtctttgctattgtgaatagtgccgcaataaacatacatgtgcgtgtgtctttatagcagcatgatttataatcctttgggtatatacccagtaatgggatggctgggtcaaatggtatttctagttcaagatccctgaggaatcgccacactgacttccacaatggttgaactagtttacagtcccaccaacagtgtaaaagtgttcctatttctccacatcctctccagcacctgttgtttcctgactttttaatgattgccattctaactggtgtgagatggtatctcattgtggttttgacttgcatttctctgatggccagtgatggtgagcattttttcatgtgtcttttggctgcataaatgtcttcttttgagaagtgtctgttcatatccttctcccactttttgatggggctgtttgtttttttcttgtaaatttgtttgagttcattgtagattctagatattagccctttgtcagatgagtagaatgcaaaaattttcttccattctgtaggttgcctgttcactctgatggtagtttcttttgcagtgcagaagctctttagtttaattagatcccatttgtcaattttacctaggcaataccattcaggacataggtatgggcaaggacttcatgtctaaaacaccaaaagcaatgggagaataatattttactgggggcatcaaaaccagaagaattatttgtggaagtggtgagcccctgaagggaaaatatccacattgcaacaatgactttttgcagcgtgaaggaagtagtaaccagaaagctttacctacacattctagaaggaatagacgtgacttaaaaccagattccaggtgtaggaagattttagttaggtgggaggggaggagagtcacttctcaaattgctgtaaagagatcatccaaattctattttaaagccttggtaaatattcccctgtctcccatgtaaaccttcatccactttaccttattctttcttgataaatgtcagtagtaacattaccaaaacactctaagctctagaaaatcaagatctctagccttttgtgtatcatttgaacctctaaatcaggtgacatacaaacaacatatccttataaaaattttgctgaattaatggaggaacacaatggtgagcgagcctccacaatttattatgcagtcaaatgtaaattgtggatatcctgccatttaaaattactcaaacatttgattttctcttaaagtcatccttcgtctacattaacttaatcttaaacagagacatacacacaaagagagagagaggcagagagacagagagagagagacatttcttctttaatgacaaacagagcacatacacatattttccaaagactgcatcttgtcttatggatgtgcaattttttcacctttcagaaaaggtggtattgttttctaacatggaatgggcttcactatttagttgtcctctggccttgggcaagctgcacaatgtttctcaaattcaggtttctcatctgtacaaggagaaattaaatgcctaccttatattgttatatgaagtaaatgagatggcatggtaaaactccattattgtttgaacctttaggtaatgtaaacaaccttagattattcctaagcattccctctcaccttttaccagctctcaacattgggtcaggacttttgtattcatattaaagagaacatttatattaaagagagcaaaggatatatgttaccttaataggtgaaaaattatggaaaattaaatagcaaatgcttcatggaacataagtggtttactcagaatgacaatggagatagatatccctgctgtttaagaatctaaacattcaaaattatttaaactctgaaggtaataatgagtctttctaatttatcgagatgatgactatattttgaactgttctagcccttaatcatgttctaattaacaatgccattgcatttaacacatactttttctcactaaggatggtgagtcatttaggtttaacgtacaatatagaaatactggtgcttttcctttaacattaatatcttactccattaaagaaggaattagcaagaattctactgataaataatttttattaatattgctctagaaatacaaatttttttatttatcattttgattaaaggttagctggccataatatggtctatttatggacattagacatcttggcattcagttaactcatcagctgcagtgtattatttcagatactatgcatttaaagtcaaaatttacattaatctttctaaaggattcacattacattaattgggatgattcaacattgacagttgtttcacttttcttaacttataaatgcaataaccaaatgacaaggagtggtgagtttcagaagaaaatgtgaaactcacttcagtggtttgtattttattttggatattttaaaatgtatctttcattactgagctttaatatatgctaggcattttgctaagagattaacatatatctcatttagtgttcataataacttaatatagtatgtcctattgttttgctcattttactaatgaaaaaggtcaatttagacactccaagctattttctctaggttattcttcaagcaggtgtcagagcagggctgaccctcatgggtgtgagtccaagtctgactcaaaactactattctatattttctcaatatttttccacctaaacgtgcggaaagcaaatgatttttcatgagttctactgtaatcccatttaaaagctaaaaaactgatttttgctttatatataggaagtatgaatgaggacaatgtaattcaggatcagtcgacccagtaacccaatagaataattttatttgtggctcaaaacttcatgagatgtaattcatttgcctttgggtatattgattcctctagtcatttaactaacgtggaaattatttctgagccccactcaggggcaaaacatgatgctggacaccctaaaagttacaaagaggaatgagacactgtccctcttgtcaggaaccctaccatctagtaaggtagaaaagacataaatgataactattatacaaccaatgttaaatttccatacaattggtatgaatgagttcaagagggtcccgttttacttctgttcccccaaaaaggcctaatcaaggtttccctacctatacagtggagaatttagctcgatttgttaaaagcaccatgttaagtgcaaccaagtgttttgaaacaaatgcctctatcaaaccgaattaatagtttttcctcttagaatttttcctgttccagctcctaaaaaaagacttaaaaaggattattgattgacttgtcccattgtaaagtatgcacctgctgtgaaatgaagccatggagaaaaatagttgaataatttaacttttttatttgtaaagataatcagggtttttctgattacatcttaacttcataaatgttaaataacctatcagcatctagttgttgtaaattatgaaaaggagcattgcaaggaatattaaccaacgaaatccttgttctttagtgaacaagaaaatgtgttatggcagcttgtcattgtgcgactggtaactttgacaccaaataacaaaactgccatttgcacttagggtaaattggttcacttgagcttccactgctcctcttgctctgacataaatttatgaactcaggaactaaccaagtcgtgtggcttcccagctgactttaacaaatatgcccatttcatttcatttagtcatcagaataccagggggctcagtcatttcagactcattgcagatggtatagggtttgtaggaacaccagagactttcgtgtcacagtcctggaaattatgatagtggagggggcccactttcctaaatgcatgccagtgttttacgtgttcacagcttagaggagcattttctgtttcagcacctcataggtatatgtaaaggacatttatttccaattaatgaagaggtgaaaaatacattttctatgctcatggtttggctagccatgtttaaatctggattaagattatgtttatatttgacatgcggtagaagcacagttttgttccttcatcctctgggagtcctgtcctttttataacagaagttacttcttgaaggatgcaaggcctggaagcagaacagtaggtacagactgaagacataaagtaaaacaacctcagatgaattggagggaacgccactccaaattactgctaacaatgaataatacagtattttcgtaggaatgcaatttgatcatatccaagtacacataaaaaataaaactagataacaaaatagtgttacaaagacattaacttgaatgaatgtaacatttatttgtagttggaatagcaactttatatgaaagatggattcaaaagtgtttgagggcacatggaaacagtgccatagttgttttttgttctttatttcattttgttccattttgtcttgtagagatgtcagccatttattaagtactttctatgttatgggaatatattgaaaggcttacagatattttctaatttaatcctcacaactctctatgaggtagctattagtatcatcattttacacatgaagagacaacatccatagaggttagttaatttgccagtggtcgcttgggaaataagggcagcagaaggatttgatctatctgacaccactctgtggtttgtctagttcaacaagaatgatggcatgtttcttatgaatgtgtgtctgtcaaacttttctgcaagaactgtcctaggaacaaagaagacaggatgaatatgcaatcccaggaggtctgaaaacagagcctgaagcaatcatcattagcttgcagtttctttaaggtcttgctttttatcttaaaaattcatgtaaatttgccattgtattccagtgtttgtcttcatccaaaaaataatatattatacaacttatcatttgggaaaacattttctactaatctcattggctaaagagtgataatgctgttatatttcatgatattaggaagatctaaagaaaactaagcccaataacaggttcaaggtcccggcaattcttcccctcttcattttgtcataaatatgtgggttcaccgtgaggcagaggttgcagtgaaccaagatcatgccactgcactccagcctggtggcaaagcaagacttcgtctcaaaaacaaaacaaaacttgggaggccgaggcgggtggatcatgaggtcaggagatccagaccatcctggctaacaaggtgaaaccccgtctctactaaaaatacaaaaaattagccgggcgcggtggcgggcgcctgtagtcccagctactcgggaggctgaggcaggagaatggcgtgaacccgggaggcggagcttgcagtgagccgagattgcgccactgcagtccgcagtccggcctgggcgacagagcgagactccgtctcaaaaaaaaaaaccaaacaaacaaacaaacaaaaaaaaacaaaaaacctgtggcttcaaacaacagccttttattcctcactgctttactgttatggcagggtaacaatagggagaaatgcccaaaatgtgatatggaatgctttgtcattctaggatactctggatggaaatttctatcagcatatcctcctgctgaaggtcaaattgcaaactgagagggtccccgattccttcttcaatctctcttaccacctcaagcaacaccctccaaaaaatactttttgcggagaggaagaagaaacctgattatattactttttattttacctctggcacagtacttaaatttttctcatccattaatgaactgagtctcaaatggtctctataatcaattctccttatccagctctcaaatttcattttaattattgcagtcttgttgagagcagtaaaaactgccagttttgtcgtggagtggtgaattaggcctcgaagaatagcctttaaataggcctattatgtgtattcaccataccagtaaagagaaaaataaagttattttttaggcatttaatttttgttatgatatcttttcctgtttctttatggagaaaaatagtatagaactctttattacctgaaacaaagtggaagtgtcatgggtcaggccaacttttcatcccatgtctagggtagaaaatccacattgagttcactttaaagcaatagcgagagactaacattacattgtcctttggttacagtatgaacagttatacttgttcagcacactggcacatcagcataaacattttcttgtgtcctacagttggttcattctgtggtgactacagagtcttcaactctacaattggctagcaaaaattctaatcactcaccatacatacaattctctaatcttgaacttttagaaagaaaaattcacacccaatttttgtgaacaaagaaacggggattctgctggttccccttcctcaaacagggaaatcctgtgtttcccaaattttccatatcaaagtgatactccaaaaaaaggcacagtaagtccttaaggtcatgataggttcttggaaactgcaattttgagtcaaaagatatataaggaaaccaattttaccttaggctagttgatataagcaagatttaagttgcaaggaatatttgtggtcacaaaaacgtcaccaaactaaatatcatcaaagaaagaccaaaacacttctaatattaaactgaaataaatatgagctatacatacatttaagaaagattaatagaaacaagtaagatcatttttaacctaagttttggcaagtcagcgagtgacaacagccatagggataaatgtttttgagcagaaattagaagaaattcttcttaccaccatgcactagtaaaaacaatcgcaagtagggcaagctcacagaaggcttttgtacagcattatttattattatgcatctatatgatagtaacacacttaatgaatctttactttacaattattcattcattcattcattttctgacacaccttttccagttcagggttggggtggccagggcctaaccaggcagctcaagaccattccgttacagggcacacacacacacccacactcgctcagactaggaccattcagacacaccaattaatttaatggaaacatctttaggatatgggaaaaatccagagtacccataaagaaaccacgcagacatggggagaatgtgtaaatttcacatagacagtggctccagctgggaatcaatttttttcctcataaatattaatgaaacaatgttgaatgaaacaacattattcgaggacctacggtactatgtttgttcctgtctttgaatatactttgacatgagcccacaaacctccaaagcaggtgtatttcaggttgggatacttggtctgcagaactttaaatttctacctataatatgcttgttccatcagtaatgatttttacttatccatcatttgtttccttgcttcggaatagtctccaagaatggctctgccttactgcacaaattttctcaaacctatcttgtcatttttccccaagttgtcctactctaagactccattatcaaggaaaagcataagtatattgatataagtgttgatatcagatgggcctaagttcaagtccttgcttctccaattaatcagtgtgcaatctggaacaagttatttaacttctctgagttttagttttctcatcttaaaaaatagtaatatttaccatgcagtattgtcttgagggttcgttcattcattcaatcagctaacatttattgagctgctactttgtgctaaagtctaggcagtggaaccacattggagaaaacaaagtcctaatttatacggttgacattctagtagtattaaatgggataatgcgtgttgcctggcataacacagggatgcattgaaatgactcttgtttgtactacttctgcaaacattgtaagactttcaaactggtttccctatgtcttgtctctcatgtttttaagccactattcatttcccaacagtgttatcattctaaaatataggtagactcttattttcttatttatacctgcaaagtctccttgttgctgattatatatgaagcccaaatttctcaaagaattaattgataaaatttagtagtcacttgagttttggagtgaagaaggcaggatccactctaaaagtcttactctaagatttccatcctaggaaaatgggaagatggtattatgacttactgaaagaggaaacctaggaaaaagaacaggtttgggagtggaaaatacagctagttctgttttagaattgttgagatcgtggcctctgaggaatatccatgtagaaatacctagcaggctgttgaaaatacaaagctgtaataccggaaagatagaaagctagagataagagtttaggaatcaatgatagaatgttagtagtttaacctactagaataaatgtaccagatagtttagccatgatgctctaaatttaaaataaacattctcagtctaagctgccaaatttaacgcaatctagcacctttcctgaggaagcaattgatcagtacttctgaagatgatcaatatctccttcagacacctctttttcatctatcctacacaaaatcctgagcatctttggtttgtaccagctcttccactctgtaaatacagaggccacatctataaaaagcaaaaccacatttcattctttagacctcatctctcttaggtcattgagtcctgtgcttcctcagtaatgttatctctagattccactgtttctaaagtaaagatagacttatgtgggtactacagaagtaaataactaaactcataaatgttaaaaactctcagatcaaggagacaatgtaatagaaaatgccattatattcttcattcaaaactcatatcctctccttgaaaaagtatgcctgttgttcatgaccaaataaaacttaacaagcatttaattatataaatagactttgacgaggctaaactgacaagacctactttctttaggaaggaatggtgaaaaatgacaattgttgaacccaaattttcgctgtatttagggccataagtctcactgacagtgaactgtcctggcccaataattaatgcactgggaattctctaggtagaccatgatttggatatttcatgggctatgtcaaggatccatgtcagacaggaggcatacacaatgctctacagaaaaattattgtcacaagcaaaattggtgttgttttctatgaactttaaaagtaagtaaacctagaaaaaatataggacagcataattgccttatatgttttaagtgaaatgtgccttcatttttatttgccaatagagtatatctttaaatagaaatattatgcttttaaaaatagattatgtacatttcttacttttggaatacacaatctaatatttgccaacttaacttttgtgaagcttttaattgctatattaaaaagtaatttacttttctattacaactttttttttttttttggaggcggagtctcactctgtcgcccaggctggagtgcagtggcgtgatctcagctcactgcaacctctgcctcccgggttcaagcgattctcctgcctcagcctcccgagtagctgggattacaggcacacaccactatgcccggctaatttctgtatttttacagggtttcaccatgttggccaggatggtctccatctcctgaccttgtgatcagcccacctcaacctcccaaagtgctgggattacaggcatgagccaccacgcccggcctcaattacaaaattttaaatagacattatttttaaaagacaaacatttgttgcccattctgttttatttatatatatatgtgtgtctatatatatttatttatatatatatgtgtgtctatatatatatacacacacacacacacacacacacacacacatatatatatatatatgtttttaatgttctctctctctctctctctttaaagggatcctcatccccgaaattcctgtggagtacaatgtcttactcaatgatggaagtgtaacacctctggccttctccgttggtcatcatcaatccacccttctggaaaatttgactccattcacacagtatgagataaggatacaagcatgtcaaaatggtgaaagtctttcagacacttggcctgggcttttatgaaaaagtatttcattaaaaaatttcattaaaaaggaatacattctcagtccaaatataaagactaacgtttcacttcttatttgtagtggactgtttacccagaaaaatcacagtctggcatcgagtaaagcattatgcatttctgcacattaaatcataaatatttaaatatattaaaatggtggttttgcaaagtcttgttttataaggccctttgaaagaaaaacacctagctcacataaaggagtctttggtaatataaaacaaaaatgagtattccaaatatttcatagaaaacatatttaccttggccttatttaaattttatccaggaggaggaagtgagaagttatttaagagttgaattacacccaaatgaatcctatatattttatagtgcttccttgaaccctattcatatatacaaactatcaccttgtgtttcatggcttaggctgtggtcagtgaaattttcatgtatctgtgttgtgttaaggaaaagcctcccccatttcctttatcactccaaacggataagtagctaaatgtaaactgtgatttaggaggggagaacagggaatcaagagagctatacatcattttatttatctcttttaaattaagtataaactttaacagatatggatatgttatatatgtgtatatcatatataacatgatatatgtgtatatcatatataacatatgatatatatgatctcatcatatatgttatataacgtataatactcatttgctaaataaagaaaacatgtaacttaccttagtataaaaaacattttgcttcaccttaaagaaatttatcagactcaatgtgtagtggaaactcctgtattgaatgtccttaggaatttctgtttccaaatagtgctagttctcatggagttggttagaattatgagtctgcaattttgctctgctgaactcatcagaaatggctagtcagtttgtccttttttctctaaaaaatagaccatggcatttttgtttgaggggtattgctttctctgatctgtcttcacctgataaacgtgaaaataattttaaattaatgttttcttgactcaagtacaaagtcaacgtctgcatctccgtgtccctgaaactgtgcaatggaggtacaatatccttcaaatagattgttttattcctgtgtgtttgaataatgttcatgagtttaaaatattggcaaaataaaatattattaaaagcatgcaagatgtgtaggtcacacatacacttgtgaaattcaagtgcattatcactttctggttagaatgactataataaactagagaaacttgagttcagacaagtttccttattattccttatttccagacaatatgccttattgtttatgtctatataaatatgtgactaattaatgggttttccaaaaataattttctatttaaatgttcaaatcccataaaaatttatttaaaacacatgtacaagtatatatgcaaaaggacaggttaaaataattttcatgatatcattacccttctgtatgaatatgtagttcttttccttgcttgaaaaataataaagacctcaattttttttttttcaaggaagttgtggagttagcagtaggatgtttgtcaaaacacctgaagcagccccaatggatcttaattctcctgttcttaaggcactggggtcagcttgcatagagattaagtggatgccacctgaaaaaccaaatggaatcatcatcaactactttatttacaggtaagattggctgttactattatttttagttatttaagaatgcgtactgctccaacacagcagaatcaagagcattttatatttccataagagaatgaatgggaattcatgttgtgtttttttttgttttgttttgtatgtttgtttgtttgtttgtagcacctaccagtgaggactaagactggtgctcaaacttttacaaattaaccaaggaaaaaagccataactgccatataacatttttgattgagatctgtttgaaaactgagaccttatagcccacataggcttatatttagtgatggggcagaacagtcctctaaagcaggggttcctaacccccaggccacagagtccgcggcctgttaggaaccgggccacacagcaggtgagtggctggtgagcaagcattaccaccggagcttcacctcctgtcagattagtggtggcattagatactcacaggagtccaaaccctattgtgaactgcgcatgtgggggatctaggttgtgccttccttatcagaatctaatgcctgatgatctgaggtggaataatttcatcttgaaaccgtacaccctaactgcattgccccagtgtgtagaaaaattgtcttccacaaaaccagtccctggtgccaaaaagtttggggaccactgcttaagcagctcactgaccaagaaaacatagtctttccagagaggaaaccagatacaagacaagaattctaatatttctcattaattattatgtagagattaaaaagttttttctcctcctccaaagatggtgcttttcataagcagaaaaaggggctctcctctccagttttccttctgttttaatgagcctccactccactggttagatggtgttatagcaacttgttccatcatgtgcagaatttattaagtgtacctacctaaaataaagaaaagagacaatagggaagagaggaagagaaagattgaggaaaaagagagacaaagagagattgagagagagagagagaaaataatggaagagagagatacactatgaacattttggtttgaaggatattttgctctctgatctagtcttcaccagatcaacatgaacattgctttaaattaatgtattctttaaataaataatgaatgaggaggagaaggagcaggcaaaggaagagaatgagggagagatggagggagggagagaagaagagaaaaaatagagaaagtgaggggaggtgagtagaaagtacaatgcaaagagccaagggggcaaataacctgtcaactgatggcttgctacttaagacagaaaatacaatcattggtagacatacaggacttgcagattgaaaaacccaatcccattctgaaagcaatgtatttcctttagcgtacaaagcagaacacccttcttctcagatcctcataccccgcacctcttcaacatcctttgttagtgtctctagcagcctcaggccttcccttatttggtcctatgccctggaaacttagtgaaacttacttaggctcctcttataactttagatattgaaatcctttgattcacatcagtcttcagtgatgagctaagggcttatagaaaaaaattacgaaaggagaaagtattattgcatttctggttatgtaaatgacattaccaaaaatgaacaagccaaatttcttctcagcaaacattaatttgaagaataatatttctgattcaaaaacacatgaacacgtaaaaatggttaatgtgaatttccattttacgctaagcacattagtgcaggctctaaaatgtccaccctcttgaaatagttttctttcatccacttaatgctaattgcatgagaaaagcacatcaaattcctattcagaataaagggaaatagagtatctgttatagaccaggacgtggcttcactctgttggttttgtaaataaagctcgtgattacagtgcctattccatggcagctatagagagggaaaacaggaaatataatgcagaaagcccgcttcaatgaaaaatactgtaaattgaatttgacagcatttgatggcatctgattattctaatcacagccaaacaatgatataaagagtaatatgaaacagaatgtgttactgcctagcagactcaaaagcaataaaccttcctccaatgtgacacaatcacttcacaatcataattgtagcctgtttgatacctctgagtacagcagaagggcactgactgacatagatacattttgttttttatttaaagtgaaatgaaaatggcgcactggggctccagatacaatcgttatattcacctacataggcatgaatcacttggcagttatttcaactgaagtttaaatgtgcttagacaacaacaatatcaaatttttcttagatagctgcaaaaaataatcagaaatttgtaaggacagaaatagaatggagacacatagttctttttcattctgagactacatagagccctttatatagttatagccaccagcctgcagtatttctgaggaggttatggcatgtaatttcagcttcatcattggccttctctttcttctatcggcaccaaaggaagtacatttagctcaaaccaaagataggatttggcctatgcagatatttttattaacttgcaggaagcccacttgtaaatctcatttgaaattgtttgccactctcttctcaccaagaccctgaatcattttcttttctgtaactgtcctttattttttaaatatttcctctagatattatcctattaaaaaatatctgacctaataaagacagaagatgtttatgacttcaaaaacaaagcaaaataacctaaatattatcctattaaaaagcgtctgccctattaaagatagaagaatgtttataatttcaaaaacgaaacaaaataacctagtaagaacaaactattaatatgattccctctgcttagtttatctgtttaagctattttgttgactatatataagtcacaaaaaaagatttgctacaaaaagttttgtaaagaatagagaccaacatttaagttagtgttttgcaacctgtttattgactgagtatagacaagactgtcttggacatctgcttcctcctctcaatgagtttggctggtatgataatgattcttcagtattccccctttattttatatctgcaaccttgcaaatggcaaaaatctcatcacttacgtctacaaaatccatcaaacacattaaattgagactttacaaaacatgtaataaaataatctcctcccactaggtgctttaattttaatagaaaccaaatttcatggggtttattattctcatgagctttctctttaaataaataaaaagatttgatcaatgtgcactgagaggcaaaactatatacaaacaccctgtaaatgctgtaaaaatagaaacaaatgatggcacttccttctgagtatttagtaagatttaaaggataaaatctgaaataattttgaagactgtatgatatgaaagggttttcaaagcagataagtgaaaacattttataaaatggataattaagctgattgaattaactaagaaaagacgagcattgaatcaaaggcaaaggaattttgatgtaattcaatttgtattgggtggaaagatggatatagatatgaatatttatatagatagatacagacagaagacagacagacagacatctacctatccatacatgtacatatctactgagagagacacaaagatctatgagacctaagcccttttaccaatgatcttcactacagtgggagatataagacaggctaaataaacaaagaaaagagtaaaatatatagtggaaaaacagaaatatttaccagaaaatttagagaataattctgtgtctagaatattcatggaacacttcatcaagttgatgtcattgagactaggacttataaaataaagatttaatgactatttaaattgtaagagaaatacatttgttagaaaaaatgttttaacagtacagaagattactaaggttattattcattcttatgatttactcatggcatatgtaattttcactaatagaagtaacactattaattttaatatattaacattaatgttttctatttgtattttcttcttcatgaaagaattatattgcccatattgttctgcaattttctttgggcattttatatatatgcccacacacatatacacacctaatttcttttaatgactcatcaatattctgttatatggatgtgtatcatatattatttagccagtaccctgatgatggcaagataggtgattttcaagttttcgttaccacagcaattctctaataaatattcttacggtaagtatacagagaattattcttagtactagaagtactgggtcaattaaaattgttgaggatttgtctttactagaccatatgcatttaaaattgttgaggattcctaagttgtcttccaaatatcatatgtaagaatttctaattctgaaatcttttaatacagggtcagtcttccaaatctgtcagctcaatattttcatttgcacatttttgttgttttaattcaagttttgatgattataagtaagattgttcatttacttaaaatatttatcttctatttgggaggggtatgtataatatattataaattcttagactaattttttctactggattatttcttattgtctatattctttccacattaaagaaaatctccctttcatgatcatattaaaaataacacattaattatttcttccagcacttttatggctctactccttatttctaaatatggaattaatattgttattggaaattagataagaattcattttcttaaaaaatgctaactagtttatcaacattatttcataatccactgatttgaaatgtcactcatacaaaattcctatgtgcatcgggttcattttaggactttgtattctgtttcacttgtggtaaatagggattttaacaagtacagcctgatggtgaagacatgataagtgaataaaatcaatagaataagcaaaatttccaacacataagcataggattcaaggaatggtcaggtttatctggagtcattgctattagtaggggacatttagaagatcagcttaatgatagattttagatctaaggagtttaggctttatattcagaggcaatgtgagctgctgaaggtttagggggtaaatagagaagcaatgtaataaagtggaaagagtgtggcatttgtagtcagaagatatggcttccagggcctggctctaacacttactagttatatgaccttaggcaagtcactgtgttccctaattttccatttttacatgaagtgaagatagtaaatataaaagataattagcctcttggaattctgtaagaattaaataatatgtgtggaattactgttaaatgtgaagcatgataaaaatagaaagttatcctagatatgttgtccaaagccatgttttagaaagacaaatccatctggcagttatagatgtacatttaaagtcaatgaaagaggttcatggttataaaagtagcagcttgcataacagtatgcctggtaggattctgttttcctttaaatatatagtatattttttacatatatatgtatataaaaaaatgtctggaatgttaaacaccaaaatagtgctagcagtgcttatctccaaatattaggctatcagtgattcttttaaatacttctgcttttgttcatctgtgttttcttattaatttttatagtcaatacatcatatggtctagtaaagacaaaataataaatttgtgagcccagatgcaaatctatcatcactgtctccgattttcctatttccttctttgtgtgaatatcaccatcactttctgtaataatcaaagtctgatcaagaaagaggaaccacactacttactttaacagaaggaatttaatataaataattagtaagtagttataaatttgttaactaggtaactaaaagcataaaaagagaactctaagatatcatggaggtggcaactacaggaaacagctagcacctttagaactgagggaacaaaggggagttgttagaattattaaaatgtaaatgcatagaggagggtgcctgtgaagctgggactcagacagttgaagaggggtacctgccactggtgcagttgtatggaggaggaaacatgaaattaagttggttttccaaatgtcggaaaaattgcatgctgcaatcacttgctcccaaggtatttctttattgcaacacaagaacagcctaatacagaaaactggcaccaggagtagcgtgttgctatgaagatacctgaaaatgtggaagtgactttggaaatgggtaacgggcagaggttgaaagagttgggagggctcagaagaagacaggaaggtgagggaaaatttggaacttcttagagactggttaaatggttctcaccaaaatgctgatagaaatatggacagtgaagaccagactaatgaagttggagatgcaaataattgagaactagagtaaaggtcacccttgttatgccctagcaaagaactaggttccattacatccatgccccagggatttgtgaaagtgagaacttaagagtaaaaacctagggtactggtggaagaaatttcaaagcaacaaagcagcattcaagactttgcctggctgtttctaacagcctacaatcagatatgggagcaaaggaatgactcaaagttggaacttttatgtaaaagggaagcagagagcaaaagttcagaaaatttgcagcctggccctgtggtagagagagaattcaagcagactgtggagtgaccactttcaagagagactagcatcactgtaaggtagccaagtgttaatatccaagataatagggaaaaggcctagaaggcatttcagagatcttacaggcagcccctctcaacacaagcccagaggcctaggaggaaagaatggttttgagggccaggcccagagccctgctgccctgtgcaggcttgcgaactgttccccacatcctgactactcttgctgcagctgcagctcgaagggcctcagatacatcacaggtaggtgcttcagggggcgtacaccaaacccttggtagctaccatgtagtgttaagttggcagatgcacagaatgcaagcatgaaggaggcttggcagcttccccctagatttcagagaatgtatgagaaagcctgggtgcccaggcagaaggctgccacaggggtgaagcccttacagagaaactctactagggcagtgcagaaggcaagtgtggtgttggagccaccatacagagtctccatcagggcgctgtctgttggagctgtgggaagggggccacttctctctaggtcccagaaaccatggacagcttgtatcctgaaaaaagccatagggattcaactccaatatatgagagcagccacagggtctgcactctgcaaaaccacagggttgaagctacccaaagccttaggagtcagtgcttgcagcagtgtgccctggagtgggacatggagttaatggagactattttggagctttaaggtttaatgtctgtcctaccaggtctcagacttgtgtgggccctataggccctttctgttagccaatttctcccttttgcaatgagaatgtttacccaatacctatatccacattgtatcttggaagtaaataacttgttttgattttataggcttataggtgaaaggagatgagtctccagatgagattttagacttggtacttgagacttggggcttttgagttaatgctgtaatcagttaaaacttcggggaactattgggaggacatgatttcattttgaaatgtgagaaagagatgagatttgggaggccagtggtggaataatatagtttgtatgtttgtcctctctaaatctcatgctaaaaacagattcccaatgttgcagatggggcctagtgggaggtgattgcataatggggtcagatcccttatgaatggtgtagcaccatgcccttagtgataagtgtgttcttgctcagtttgttcatgatgggagatctggttgtttaaatgtctaggactccacccgccccccgcccccccgccacctctctctcttgctcctgctctctgcacgtgatgcacttgctctttcttcaccttccatcatagttgtaagcttcctgagtctctcataagcagatgccagcatcatgctttctgtacgccctgcaggactgtgagccagttaaatccctattctgtataaattagcttacctcaagtatttttgtagcaatgcaaaaggagcctaatacaaattagaaaaaagaggtagcacatagaaggatatgataactcttatttgagagaaaagcaaggaaaagactttctggaaaaagtgatatggggctagaattttaaaagacgagttgtagttagtctatagaaaaaaggagaggccaggtgtggtggctcacacctgtaatcccagcactttgggaggctgaagagggcagatcacaaggtcaggagatcgagaccatcctggctaacacagtgaaaccccgtctctattaaaaatacaaaaaattagccaggcatggtggcaggcacctgtagtcccagccactcgggaggctgaggcaggagaatggcgtgaacctgggaggcggagcttgcagtgagccgagattgccccactgcactccagcctgggcaacagagcaaaaaaaaaaaaaaaaaaaaaaaaaaaagaaagaaaaaaggagaataagaaagaggattgggagggatattgccagagaattagcagataccaaagccatggaaccgtgaaatataatggaatataagaaactatagtcaagcatttgatgataactagaatataaaatgggactagaaatttcagaaaggtgagtccttttgagaatcagcagattaaggataagcataggccattttacatggtaaatctctaaagaatttttaaaaggactgtcttaaaatttttgaaaggtttgtgatgtctcttccctcaacagccaagtctctactcacaccaaaaacttgacgattcaaccttcacaaatcattttgtaaatcacctgtgtttccatttgtcctctcagcaatctagttcagggtctgcatttattcttacgtaaactgttgagatgacctccttgttcaatgccagatgcacatcatctccatgataacttcattcagatcatgcattacattttacccaatgatttttatgttttaatttttataagaattttcagaggtttgttatactctatgaggttattaactccactttacaaaatgaaatagaaactagaggacacagacaggcaagttcacccaaggtcattgaactaagtggcagagccaggacctccaacctatctcctctgactacagatgtttctgattatctatttaaactcagaatatttgtaatattcttcatggaatggggttggcagtttcataacctcaaaattgttatggtgcattgggttctaggattttgttttaattgcttttgaaaataagcagtgacaattgctggaggggagagaaggagtaaggagctcctaaaagcattgtacattgagaccacagaagtgtgactgcctttaaaaatatatggttcctagtttttatacttatttttgttttcctcttagtgttaggcaacattaaattaactctagttggaaaattacattcctgaagtatctcccaaatgagcctgagcaaagaataaccatttggctattcagagagaactgaaaatgtgatttctctaaacacaggctactcaggaggaaacacttccagttaaatgaacaggtgatgcttaaatcttaaataattaggaataattgtggtctactcaaccacttctgctctaaatgtattcagacataaagagagactctgttttttagcagtgcagatgggacatgtacttctccacgatattaatttttcaaggattcaatagcgataagaaatacttaaccaggctgcaccttttaattcttttggtgaataaacttgaggccaacataatactcaatcttttaaatagtatatgtatttaaaaccccacttttaggcaaattttgttaagaatgtcggctttatagaaaccatgactacatctcaatttgggaattcgtgagagtttaataaaaattaattgaattgtcatggaaaggctgaagctagacaaaatagaaaatgttacttccccatagaccatcataggtttgtttgctgtattgtgttcctagcaaacaactttttaaaaatcactgagaagagtccttggctatgagccctgcagttctcattagaatggatctctcccaatgacacacctggtacctgatatctgtagcaagtacaaaggccaaaccctgcaaaccttcactgagtgcagaatctggttcacgcatggtagtgagcaataatgaggtgggctgccgaaccataattgcaggtgactgagaggtgtctatgaagcctctatagcttccagcatgaagcttgtcattgctcatacttaggtcatcgtgatttatcaacttaaggatcatcagattcccaaagccaaagattttacatattctgcctttttgtgaaaggtaactgtcattcactttgtcttaataaccctttacattttgatggagctggttaatctgatatggcagcatgtgaatttttcagcatctgaagagtgtgttaattaaatacttctaacagcctggaaaatattactgtattcatcactctcttctcaactagagagagagctgaaagaggagggtcaatgtcttggttacattctctcccaacctggaatactgccctgataggaaataagagctgatggagaagaggcaaagatgcagggaagtaatgggattccataacttttagcctttcacttgaaaaacatgattgaacacttactgggctcagatgctgggaatatagagatatgccaaccacagttcctccagaactttgctttccatcaaacctgcatcatgtttttacatctggatgagaaaagaactgttccaaatgaagtatcagatatatagggccgtctcaacaactcaccattccatttctcttacttctatatttaatgctatatatatttagtaccaaaagagtatgcatttggccctagtttccctatcaacaaaatctaaagatgagcctaaacaattccatcctcagacagttgaaagaattttggggtcatactctgcattttaccaggttttggggaagacatctaaaaggaatttgacttttgtcctttaaaaatctctaaagcaagccagacatggtggctcatgcctgtaatcccagcactttggaaggccaaggccagaggcttgcttggggaagaccagcctgggcaacatggcaagacctcatctctacaaaaaaattttaaaagttagccaggcctagtagcacacatctgtagtcctagctactcaggagactgaggcaggaggatttcttgagtccaggagtttgaggctgcagttagccatgattgcatcaatgcactccagcctgagtgacagagtgagacccagtctcaaaataaataaataaaacaaaaaaactctaaaacaaattcctattatattacttatcatgttattttcattaatctgcacatagctccatcttctctactcagctacctattcctttaggtaaggggtgtgttcatctttttacccttgtttctaatacaatgatgggcatataacagtgcttaataaagttgttgatgtataagtacaataaatgtagaaaaaacagtggtcttgatgtataagaaaagattgtccatactttgagaggttatggtttaaattatagaagagaaaattcaaatgaagagaaattaagtggcatctaagaagtgaatttaaaatactttgtaaacatcctgggaacaattgcaaaagagcattgtgctgcatgagagaaaataggaactgtggacttcccttcatagttcttcatcatccagtatgccaacctgggctttttcacacagtaattttatggtcctaagagcagcaaaaggatcatcctcaatgtgcaaacacttttgaagtctctgcaatcatcatatttgctactgtcccatgagccaaaaaagtcatatagccaagctcagagtgagtttacgagcatactcgcaaaaggcctggatacaggaagacaaacacattgggaccctagctgcaatccatttatcatagaagggtaaggattcccaataatagcttctactaattccatatcctgtggttccagttgtacaaaaaataaaaccccgatataactgcatgcatacatgcacacacacacagacacatacacacagatctggaaaatatataaaaatgcattaataatgtttaatatatgcttctgtatttttaaaagattttaaatatgtttgttttcttgtattgcatatgtatcttgttattcagcaaaaacatctggaagataataaaatgtgattttggatgaggtttcaccttttgtgctttttatatttcttctgtgttttccatgttttctacaaagcatatgcactcttttataatcagtcaaatacgtgtgtgtgtgtgtgtgtgtgtgtcaactacactttaaaaatgatatggagttaggccactggagtacttctccatctggtttttctttactatgacaccaggaagaaacagctgaaaagttaagttgataacaaattctaaaaaaaatgtttttactccatctacaaactttgttttgaagtgtgcagctgtcactggttgcctgcttggtttcctttcagacgccctgctggcattgaagaggagtctgttttatttgtctggtcagaaggagcccttgaatttatggatgaaggagacaccctgaggcctttcacactctacgaatatcgggtcagagcctgtaactccaagggttcagtggagagtctgtggtcattaacacaaactctggaagctccacctcaagattttccagctccttgggctcaagccacgagtgctcattcagttctgttgaattggacaaagccagaatctcccaatggcattatctcccattaccgtgtggtctaccaggagagacccgacgatcctacatttaacagccctaccgtgcatgctttcacagtgaaggtaagaccctttagaaaagtaacagacatgcagattatctggtgaatacgttgaaattaattttcttgtccaacttctcatttttcttcacttagggcttaaatatatgaaaatctttcacttgtgaaaagttgcaatgtagtcacggggataagatactgaactgagtatgaggagtattggagaccagtttgtagaccacgactaattttgattacctcaaaaccaataaataaattttatttattcataaaattgcctgatttccattttccatatttactaagtgggaatattttttttttgagacaggctctcattctgtcacccaaactggagtggagtggcgtggtctcagctcaccacagcttctgcctcctaggtttaagcaattctcctgcctcagcctcctgagtagctgggattacaggtgcccaccactgcccaactaatttttgtatttttaatagagaggggttttcaccatgttggccaggctagtctcgaactcctgacctcaagtgatctgcctgcctcagcctcccaaagttctgggattacaggcgtaagccactgcgcctggcctaaatggaaataatttagtcttgatttccattttccatgtctactaaatgggaataatgtaatgctttcctccatacctcatagagatgaggttcagatgaaattagacagaatatttaattttctacttccccaacaagctagtataatatatagctatatatatatgtatatgtatatatgtatgtgtatacatgtttgtgtatatatgtatttgtatatatgtgtgtatgtatgtgtgtgtatatatgtatttatgtatatatttaaatatacacacacacacatacacaaagttgcatacactatggcttactggtgatttttttcagggatggcttcctctggcccatagaacgacttaattcagttcacctgagcacttagtagctcctgagtgctttctttatgtccagcataacctcatggtctatggaatatacagaaacaggatggtccttgtcacagggagtgttccgttttataatattgcagagatgagaattgcacataaggggaaaagaatgagaagcagttgagtacagcctataatgtccactacactgagacttagatcccgaactccactatctactagctttaaaccacagtacaagagagagtaacatcatataccaagtgttaggcaagaaatgctctgggagatcaactctcaaactgaagatgcttcatggataagattaaattttgtggtcttgggagtgaaatacaaatatgtgccaagaccttattaaatatggaaaaccctcaataagaacaaataaacagacaaactaaagcatttataaaaaaaccaaaaaactatgtttctatgctttaaatcctggaaggccaatttacatgaaggttatcttatggaggataacatttatcaaaatatttaaattacagtgagcaaatatattttcattaaactccagaagagcccttttaaattaatagtttaaagtacaatgttttcccactgtcctcatgtttaattttctcatatgactaaaaaataagcaatatgtaaatgaaaggataattgttttatcttcatttttatctgtttcagaattagtactatatttttattagatagtaaattatgtactagagtcttttatattatgtcttctagttcctatatgataagcattagaagcagtgttcttaagtgtaaaagatactttttagtggatatgtgatccaggaggaagttcgttacttcccaccatatccttcaaactcatgttctaaactttcacccttaaagtaaaacgtttatgagtatactgaaacacccttgttaatagctttctgaatgaggcaccttaatttaaatatgtttttattgaaggcatcaggattataatgattaaacctctgatcttttaaaatacaactttcaggggtaggagcctaataatcatttagtctcacgaaacagttctattggaattcccttgtggaataaccctgtaagtcatcccttcataaccagcttcattttaaaacacaagatttaaagtatatgatgaatccatgaactctgttctttatttaatcttctaggctctatttttatcacactaaaaagcttctgaaaagaggcaagtgtatggccccaagctttaagcggcacagggctctttgcacatgggccctccctgatgtggctttcattttgacagtccagtactggtgtgcttttctatttttccaaagattttttttcttgcaatgtcgaatagattagccagaataattttaaaaacaatacttctgtgtcctatttttgaatgtgtatgtgtgtattcaaagtggcctcccaaaacctaaatctttggctcttagaatttcaagagaaggcttcattagatacaccaagaaaggtcccacctgatcttttcaagcaaacaaggacatcttccacaaagcaatctaggcaagtgttcagaccttctggccactggaccacgttttcagggcatcagggcaactatgactctttatgatctgacacctttgaaggaagtcatcaggaaaatgaactagtgtttttgtgtttcacttattcccacagtccctgtgtaggagattgtgttcaatatttttgtttaaaagatatctaggccagacgcagtggctcatgcctgtgatcccagcactttgggaagctgaggcgggcagatcacaaggtcaggagttccagaccagcctggccaacatggtgaaaccttgtctgtactaaaaacactatttttagtatttttactatttgagaggctgaggcaggagaattgcttgaacccaggaggccacggttgcagtgagccaagatcatgccaccacactccaacctgggcaacagagcaagactccgtctcaaaaaaaagtaaaggaagttctattacttatccagggttctatactcctcaccgtcacagaagaatgtttcttttatctcagacaaatcctgcctcctataatttaagtctatctccctttgttcagagcagcatgacttctccataatagcacaaaggggcttcagggtccaacaaattattgacaattcaatctgatttggcaaataaccattgagtactatattcaatatgtcaatattgaataccaaacttaactatgttgttgaagtctactgtgagacttggcccttgagcagagcagagactgtgaggaagaatgagtgattcgttctgaggcacaggctattactgttgggcattttgggtttttaagcttcttgcagctgcgtttctgctgcccatgtttagaagaccccatttcatttttatttttgtataaacttaatgggtccaagtgaagttttgttacctggatatattgtgaagcagtgaaatctgggcttttagtgtaaccgtcgcacaaataatgtacatcgtacccatcaggtcatttctcatccctcaccctgctccctccctccctcccacccttccgagtctccagtgtctattattccacaccctatgtccacatgtatatattatgtagtcctacttataagtgagaacgtgcggtatttgactgtctgtgtctgagttacttcatgaggataatggcctctagttccatccatgttgctgcaaaagacatgatttcattcttttttatggctgagtagtattctacagtgtgtgtgtttgtgtgtgtgtgtgtgtgtgtgtgtgtgtttcacattctatatatatccatatatataattacattctatggtgtgtaaaattattcctatttagtaaatatggaaagtggaaatggaaatcaggagatatatagatatagatatagatgatatagatatagatatagatatagatatcacattctgtttatgcaatcatccattgatgaacacttaggttgattcaatatctttgctattgtgaatagtgccgtaatacacatacgaatgcaggtatcttttttaatataatgatttattttcctttgggtagatgcccagtagtgagactgctggattgaacggtaattctacttttagttctttgagaaatctctatattgttgtatattgagaaatctctataggggttgtagaagactccattttaaatcgcatcccaagtacttccctagatctacttactgtttatctaatttctgcaccaggtaaacaactttactgtcttctttcctttctgtgcctgctgtaggaaatttttcaagtttttgtttattggccactctggctaaaattcttcagggcaaaggaactacagaaccttctccattaatgaggcacagagtccatccccacaactgtaggattgcagttcagtccacaaactcgcaagaggtactgctaatgcattagtcccttgtttattaagatctcatctctgcccaaggggccatcaataaattgcccatgttgtggtgccatcactagcttgccccaaggtccccccagagttgtttatagacaggtggatgttgctgagagagccacataaaacaggtgcaatggaggcatgaattctgcttgtggtggcagtggatggagaactggcagtgggggccctccgtgggggtgagaagcgtatgtgttggcaggaacagcagcagcggcagcagcagcagaggcagcaggagcagagaaatggaaagagtgtgggttttaatgcatcactagctgctctcccaacctcatgaaaagtttcacctccctactcatctctatgtaggtctttctaaggaagaaagagggagatcaagattcttggggtctctttagaccaataccttccattattgaaaacagctttaattagaaggccttaaactcccttcccaattagctctgtgatgaattgtgcggtgtcaggaaagaaactgtatttagccttgcttggcatgcaggagttccatggtggtatttacagggaacactcctggcaaggttggcgatattgctaccaccatttgggtttgtttgctttttctcactggcatctgccattgtgctggcagaaataaatctgataatttgggattttaaagaaaaaggtggtttacctattatctgtgccctaactatatccttgcttgttccacggggttataaaacgtcaagcccagatcatgcatttgcccagtatcctaaaagataaatggtacttcactctgtgtagaatcaagcataaggtgctgagaaataagcaaattatatgggtcactaaaaattggcttccaatctgggaataaaatccagaattactaactctagtttctagattctagttgccaggcttcctttcccaatgtcaaggaggaggtagtcaaaatttcctcaagggtttgtttcctatatctttaccattaagtagatatgtggcaaaaataataacaataataataaaatagatatttcacaattgccatgttatgaagagtgtgtgagtaaattgataaatttatttttaatcccattttcattttggcttagataacataaaatattactgctctttacatatgatcttaaattagtttcaactctttttaatttgatgattcttagccttttctccccagacacatttattagacaacagaaatactctgggagatgtagctttctaaaaggactcctttggtgactatctttctaatgtgaagaaaaattcagtaataaaaataattatcatatttcctgggtcggttctataaactgagattttcacattttataataagaaataactgtgtcattcttctatataaaagatagaaaacatgggtgagtaaatatcacacaaaacaatgaatatttgtcggcctaaccctttttttttttttttttaaagagacagggtcttgctctgtcacacaggctgcagtgcagtggcaccatcatagctcactgcagccttgatgtcctgcactgaagtgatcctccctcctcagcctcccaagtagctgggactataggtgcatgccaccatgcccagctaattttttaaattttttgtagagattgtgtctcactaaattgccccagctggtctcaaattcccggcctcaagagatcctcccgctgcggcgtcccaaagtgttggaattacaggcttgagccactgaccatggcaaaactttttagttgtgatgatattttagctttaatatcaacttttcatttacttgccttacataatctttaacccttttgtctaatttgggctagacaaattagactttcagacaaatatgtatttgtctgaaagtcataaatacatataaagaatctaccttttgctcaacattattggggatgaaaaccatgtaagtcttttgaaatttatgtaattacatctttgaaagagccatatttttctccaaccactttatcccagcaagctccatcaggattcccttgctcacccatcagtaacatctaaggcaggtcccatgattttccagtcacttttcagtggcaaggatcaacgcaactggtgattaagactcattccaagtgttttttaaaaacttcagtctagactgggggcgatggctcatgcctgtaatctcagcactttgggaggccgaggtgggtggattacctgaggtcaggcgttcgagaccagcctggccaacgtggtgaaatcctgtctctagtaaaaatacaaaaattagccaagcatggtggctggtgcctgtaattccagccactctggaggctgaggcaggggaatttcttggacccgggaggtggaggctgcagagagccgagattgcaccattgcattccagcctgggtgacagggcaagaacctgtctcaaaaaacaacaacaacaacaacaaaaactccagtctaaattaaaacctgatatgtgcttaaggatctgcagtggggaaagagggcatggtcattttcctctttcttcagttccctcttctcttatttatttccccaggatcatggcatgaaaagaaagaattagacaaaaaggaacagagctttactcaataatattgctctaattaatcttctattaattttgagggggcagatgcctcatgggattttctctgtgggttatataggggtccccataggaaattccatgcctcatagtcctctgatgcaggcaatacactctctggctaatttcttactatttgttattgtccaagaggtccaccctacaacctttttttgcctctgggggcccttctcccaagcaggcagccaatatcaagtcctatcacgttgacaaaactcattcctttcttggcacccactaggattgcagaaaactttggtttcaccaaataatgaaggtacagcttgtccagtactatattctctgcttgacctatcatgctggatgaaacctagccagtctcctaactttggaattcattgactaagacacaggtattagcttctgtgctagcctattatcccaaaactatgggatcacttaaggatttcagaagacccttttgactctagtcattgcatcaaaattgtcctatgaatttcatcagtgcagtaggaagcctcttgccaagaccagactgttcatctcacttttctggcaacactcccaatttcttcaagagcttctcttggatattccttgcatgccttgaaaggggagtgtggagaaatcccattccctccctgaagtgggaaagatataaccaaagcctctttcttctccactgaatccccttctttaattttttttatgaacttggatcttctcatataggttgtctacatagatcttcataggaagatggatcttgaagtctgttttttccataagtcatgcagtgatatgtctagctgttccagtagagttacttaccacctatttttctaaatcatactcattattctccaatacagttctgtttcacatcctattatataactaaatggccctatcatctttctagttgcacaagccagatcatttttgagtcctctctcttccttacttccatatcaattcttcactaagtgctattgattctatttccaaaccatatcttaaatccttccacttgaagacaacattaggatcttcacacatgttaatccctcctcctggaatgatggctcattctcctataattcatctgtcctcattcttactcatcaagtctgaactaaaatgttgcttatctcatagggctgctgcaatgactaataaattaatgtatatgcaaagtactgtaaagggcaatataaatagactataaacctttagcagtccttctttttgaaaaaacagagactggaataaattagcaaatgtagataaggttctggtttgtctaggcaactgtactaatttggtcatgagtgaaaaaccttatgttttatacattttaagtgttcctcaccttgcaataaaattctgagcttgcaaatttacatgtttcctgataccacattgttaatttccctgtaattttccaaatactggattaggttctatttcctttctaaactgcctgaagcaagaacatgctttttttttttttttttttttgtctcctgaggtttattacggtcttatccctggcccccctgccccaacaacatcacatacctgccagtctaagagccctcctcaggagatttccaccctatatgtagttctctttacctgacatgacactcttaggaccctaccctttcccttagatctgggattatatcagcagaacatgatgaggtattttagtcacacacacacacagacacacactctcacacttctcaaatcatacaaatggattctgccaaattggcatctacctacttcccctatgccaaatagtagtttatcagtacatgagggacagttagttggtggggagactgtttgacctgtgagtcaagtatgttgctattttctggcctttaaccaacttacaaggaaaccctctttagacacctaagactcccgtggagccttgtcaaaaatgtctgtgaaagtaaaatgaactagtccacatactaacaggcccaggccataaattcagaatatatgccatttagcagagacagcaagctgtaaatggcagtgaagggcagaagttaattgaactactctgctcttgtcacagatggaaagtagccactacctgagacaagatggctgccccgaagtaccctattacagccaagagatcatatccttagctctgcaagggcttatgggtgagggggaaatcatacacagatgaccaatttttttatggttcacagccgataaaagtgaaattcagcagctgttcaggacaagtgaccactgtaacagctgtaatataacctactaaatagagagggaattgcattagagcaagaggttagctgtgatcatcggcaggtgagtgctttattgaagttgaaagaccattaacattgatagagtaattatttcaacttgaaagtaattaccttgatgggtgataacttctctagtgttcccagatttgattgggccaaacaattgtgagctcctgaagcctagaaaaatattacaacaatactgtgatttttaaattactgaaaccactgttggaatattctaattatgccgaacagtgaaaagattttgccttacacaagctagtgacctctcatgtagagagagacatttgctttttaatccaaatgcaatgacccacacccaccacctgtgaatacatatgtgatgggtttgcaaatgaatctttttatctcaatataatttttaaggtgaaacatcttgttagtgctgtgcctgggtaatagtaagctagaactgctgacatttttgatcatatctatggacttgaagtctccagaatggcaactatcttctatctttgtcacagagggtttaaatttgtataaattaaatattttgataatgactacacataaattagaatttctggatgccacgtactttggatcccaaatttcagatattatctagttacataatcagttgtttaaataactttctcgcctgatgttatgcaactccactacaaacactccattgtcagggtattttccgtttacctacactggacatcagcaaacaaaattaaagttgaaaacctgggctattgcttctctgtagtctcatgaatatatgaaaattgcaagttatttgcaattgagggccaagacacatcaaatctaattcagtgatcaagaccaagaaatacagggctcttccattaatcagtttttcaccatatttctcttttgagaatctacttggtccagaagctataacagatacaaacaaacgagaaatagtcttttctctctgaaactcgtcgtgtatttggagaaacaataagaaaagagacaaaatacaatgtaataagcaatcattttgtcatgcatggtattgattgtacttataaatagttacaagaacctaggaagactctagcccatactcctgaatccaaacccagcactcattctatggaaccacaaaccattgacagaaaaaacacaggcatcatgattcttagtcatgttgtcagaaaagatgaatgtgacatcaccttaaagttcctggatgattccgtagacctttctatcatcttggcagggtttgatcagatgatcagccaatgaatgactatctttttggcggcacttcccaggagttttttctaatcaaaatctcagactctcctagggacaaaacaggtttctacttgttgtctaagagccaataaggaatgttttaccaagcagttaatgggtttctttcatctctccatctcggctctgaattcccctccatagacaaagtctttgggtctctgtttcagaaattaccgtagggtagaaatctctgccaagccagaagacatttgcccactggaaagtaatgtaactggcttgaatttggtaaaagagtgaaggtttgagacaaaaacataccacttgggaaagtgataaaaatttatgaattgaattgtaaatcttgccattaagccaaccaaagagtaacaaaatctgaccaatctgacagcacatcagagttcttagcacagcaggctcaccatgtgtcatatacagccaggctaaagattgtattaaggacccccttaggtactctgaatttaaaataagtgtaataactcatttttaaacattttatatgatacttgaattattaaatattcacattacaaaatcagagaattttaatccattcaaaagggtgggttgtctaacactgaaagataatggtcatgtctagatagtaaaattacagtatatttttaacggatgtacatgttactttttgacaagacacaagtagtgaattttatcgtacaaattcctattgggtgattatgatacagagttttatttttgctaaagcaattactaatgtcatggctggatacctgtgcccattagtggctggttctgtgtttttttaggatggttattgatctcttgctgagctgagattcaggttttatgccagatagcttgattaatgggttggtttctataagtggactgaatggggatagaaagcaggggcagcctgctctgccaaccccaaatccgtcaagacgcatagctcattatgaaacagttatcaaggatacatgaaaaattaattgggctcagtttgattctgaaaagaatcggctttctacttggcgggcccccccgccccccttccactctttccagatgttctgcaccagcccctagagaaacagcaaagggagacgtattaatacattgtattgattagatcaagacccctgacagttatttgtagagataccatctggctgctgttcgaattccttcaccaaaaacaggacgtgacatgttattaatctcaactctctaagtatagacagttgccttttctgctaaaccgcattttaccattccgtaggagatggaggaagacctgaagggtgcagaaattaaggttattacacaaattgagccatatggtccaaatatttcagcaagaaaattgccaggcaataaaaattgctcctgccttcctaatggtgtaaattacagtttaaccatggctctaatgatgtccttctgccgcgcttaactactgttacatgaaggacattgttttaaaaatataaaaaacaagtaaatgccagcagcgtgttttacaatctgttagtgtgtcattaagaacactgtcagaattacataaacataatggcaggcaacccagcatacaaaggaactcgtatggaaatagaaagtgtcttgaaaactctcttcattatctctgaaatgtcaagagcactgtcccctctggaagttttctagggagaaaagacctgtccatctagtgctttattctaattctcatgtgtgtcccaacagcagtgttttctaaatcaagtgtcacaacccatagtgagactaagtacacatctggtaccacaaccctgtccatatacaaaaaatgaagcagacaaggtgaggagacagctaatgaattctaaacaaaatgatagacgttgaccttttgaagtatttttgtttttggggaaaacagttaagactccactatcttccttgatgatgacatcaacaattaaaagtataatttctatcctcagcaaactaacctggcaacagaaaaccaaataccacatgttctcacttgtaagtgggagctgaacaatgagaacacatggacacagggaggggaacaacccacactggggcctattaggggggtgaggggaggaagagcatcaggataagtagctaatgcatgtggggcttaatacctaggtgatgggttaataggtgcagcaaaccaccatggcacacgtttacctatgtaacaaacctgcacatcctgcacgtgtatcccggaactttaaattaaattttaaaagtataatttctgtcatccctatttggggcatgatattaagaggaagcttacttaagataatcaaaaatctttgggaattacaataaagaccattaatatttgagtaagacttgaacccttcaaatatttttagacctattacaccaaaaacacctcggcacttaaaaattccatataggtcatattgatgttttattctctaaaactgcacaatcctccaagctttttggtcttctaagatgttataaacacagtttgttaaaggaaaagtccagataaacgtttgtagaaaaatttgaagggaaaactacttttaattcccagaggagagttgccttatctttaagccctttttccttctccatttccccaaagggagaaagaccaggatataaattgccctttaaactaaaaaagaaaaaagagagggaaaaaacctaggaaaccaaaaaattattctttttgcatgcatgcattaatattaatgagaacccattaagttattatttcctcatggcacaaatggcaaggctagcaatctattgactagagcatcttctgcctggaaagctcttacccaggtgtccccatggttggctcccacactttcttctggtcttaagtgaaaagttactaccactaaagccttacctggcctactcagctacaatttcactccactctccctcacacacactttctattcctcttctgtctttatttttctctttaatatttagcttttatttctggtttcttgctaacctgtaatcatatttcagaaattgtttttcaaatgctttgttatgcttcttatttcacctaaaaggaaatctgtatgttcacagctaaatcaaactgagaaagcatcatttatatgttccaatttcaatttataagctgacaacttccacataaaacatattatgggcactttacacatgccatcttatttcacctcaataaccaatctgtggagtattattacctaaatttattaatgaggaaatggaaactcagagaggttaagtagcatacccaaggtcacacagctagctgcagagtttggatttgattgcagctctctcagcttctaaagccttttctttctgttatccagtattgcttcttgagtttcagcctagtggaacaagatgttatttatgaaaagctaaacatcaatgaaagccacaaattatagttcaataggacaaagagatgacacagagcttgatatgattcattgcctagtataaatatagaaaacaattgataaaagtttcaaagaattaaaagatcacttggactggaaaagttcagagaaggcttttgggagaggtctgtgctttgaacaatgggtgaaattcaaatagaagaaaagtagaacagatattaccttattcaggcaaagaaacagaagcctggttttgaaacatctgatggcaagtctctgcttcaggaggtcacatggggaatatttttccaatatgcccccattaattgggctgatattaaaacaactgatttaaaaaaaaaatcaaaatactcccaagagatgcctagcaaagctattgagtgaggtggttagcagcatgggtctggggtcaggaaacatagattagagactggctttggcttttttactcattgtatgccttcaggaggttatgcctaatagtgcctcccgcagagaggcagcacctcttagagtcgcaggaactgagacggcactcagtaaatagtggtgagtaagattcaaaataggttttcagagaagaaatcagcacatgaagatatcatggtgtcatagtgtgttgacagggtcctgtctggagatactagtccagaatttcaaaaaaaggaaaagttttcttctggccgggcgctgtggctcatgcctgtaatcccagcactttgggaagccgaggtgggcagatcacctgaggtcgggagtttgagatcagcctggccaacatggcaaaaccccatctctactaaaaatacacaaattagccgggcatggtggtgggcacctgtaatcccagcaacttgggaggctgaggcagggagaattgcttgaacccaggaggtggaggttgcagtgagccgagatctgccactgcactccagcctgggtgacagagcaagactccaaaaaaaaataaaagaaagaacaaaagaaaagaaagacaggaaggaaggaaggaaaatttattatattttcttgtttcccctgcattccctaatacccctttcccaaaagtatggatttcttcactaaatatgttagtagcagaatggtcttgtggcagttgacccaagactccaggtagagcagtggggaaagaaaagacaaggccagccaagaggccagccaagaggacaagctcctccaaaggttgacttgagatattaaactcattgaaaaagttactcaacatccacagtgttctggtggtacctcacttagtcctggacaatgaatcacagcccaagcttcatcattgaattggtgacactgccgagggccaactcaccagccttcaaaaacgacagtgctgctgacagcaaaggcgatgaggacacacatgtgcatccacccttgagatgctaaaagaggcaggaaagaacttgagggaaagaacaaatcactcttctgagattgtcctataaactttataccaggacctatgctatcatcctccttacctaatcatgtttaatatctgatttataagaatctaaatgtgtacctaaaagtagctttctaaatattactgggccacattaaactgtgaccaattttcttccttcctggcctaccacattttagaaatatgatagcatatttgggttgggagtcgctaaaggcctcaagagagtccatctctttgtcctttctgactaggaagacctggtcatcacgccacaagccttggtgtctcgtttttaacagagcaataattatttattagtggaatatatgcttattatatccagaaattaaagttgttaggggacatttgtgtatccaggtccctgtggctgggtgatcgcatctgttagaaataaatcactttaagaaaattatattagccccacagacagtcaagaatggagcaaagggagggaagtgtgaatagggtgaggaagcttgattttaaatcttgtgaaatagagtgtggtcaatatgttgtcagcacattacagtgtgcagacatcaactccatttttcccctctttgaacctcaggtggccaattaacagtatatgctatttattcattacaaaacaggcaggacaaattgaatggttagaatgactaataagaattcttagcaaggagtaaaataaaaaatgatacataaggagagaccccccagaaaaactttagggatttccagaaaaaaaagtcttgaggagttttcctgttaaatgtatctagaatttctactgacatgaggaaattaaaatggaaagattctctttgaatacattttcttcctaaaatatgttctcttcaattccctcatttgtatttccttagagtttcattccttcctaaagcagaaagacagttttaaattacttctagcaattataagtatcattagggtgttttgatgctgcatttttacaacaagcactgtgcttgccttccttatttgtctctcagttcaactccaagtcgcaacacaggaaatgaaaaccttgtaaattgacttgatcttatgaatactcacttttgcaaatatgaaagaacttaagaagggattataaaatactccttatctatataattaaaattcagttgaaatatatgaattcaatattttaattcatgcatttcattttgcgggcattcaaagattatatgcttctatatgtctgccattgatttctgtaaataacattatctctcttattgcaaaacgtacatcagaagaagttggaagaaagcgagggcttgagggatgttaaactgaagcagcagtgacttactatgcagtgttagtagattgcttgccttgaggatctagaagccgatagaagaaatggagccagcaaataagaaatttcttatttcttattccagaaataagaaattctgaacttttaccttcaaagatccaaaaagaacatgctaatgttcttttttttctaacttttgagtaatttagtcattctcgttcagaaaattaagggtctacatctggcagcaactgaaataaatggctcaattgagtacacacttgaatgtcaaatatatcactttaaaagtcaatatttgtttcagctgtaaatgtttctgaacggaaatgatgcttttagtgtctgtagtctaaggagtagttttatttttgaaccctcaaattgagtgctccacctagagccgtaggaccctttcctttccatgaggagagcgccctctactgggtatgtttacttaccacgcatgactgttaagaccctgagctaaacgtatgagcagttgagatgtacataagaaagagtttttggaaaatctttgcccctgcttgtactagaatgattgcaagtgtggaagtagccatagttcactgtagttttctttttactgctgtattattgcaccctgttgggggatacatctgagcatttcatgtgtcctacttttaaaatgcccagatggtggctacgtgctttggtttgaattgggcagccctcatctttcatgctctgtagtctgcctcgttatcagagagacatgagacaaggaaaattcttccatttttcagctcctcttcatctgtttctagtcacccacagtgaatgatgcacttgcacaattgttaaaatgacagtcactgtgataactgaacatcacttccctgggatggggagttccctatgtacccatagcttcttgattccttcccaatacagcacctttttcagtgtaactgatcacttgcaatcttgtaagtaacacagcagtgagaggcagtgtaaatattttataccttgccccaatcacttgtatgtgcatcggtcttcttcactctagcctttaagcttaacagagattttaaatcaaatcattcaaccctagaaatagtcaaaagaattaataaaataaatgaaacagtgtaactggttaaaatagccccagtgcacaatacaggtttagtatgattttgtgacatacacattttatagggcttttgtctccaactacattcttcaaagagccatctgggcaatgaccataggtatcatttttaccaataatagtcagcacttcccactgggaaattagtcaagggaatgagtttttttttttttttttttttttttacaaattatcttcaagcatctatcttccaaaaagtattactggactttgtccattacaaggcaacaacctaagtgagttacttgtgctcttattttagaactttattcatcagatcattgtgatcaaactcaatttcattttcaaagaggaaaaagattttgctctgtttttcttcttaataataggtttgctgaaggaagaacattaatacaggtcagcgatctccaaactttttagaatattcacttgtagaaataataatttggggagcacacatctgcataatatgtatatttacttatttgtaaattataaaatatgtactagttaaatagtatcatttacactatagaaatagacatttttaaaggagtggaaatagataaaattatcaagaaaatattttattatgagcaactactatcaataatacctcaaggcacaatacacactgaaagattaatcattaatgatgctgaatgtcaatctctttcctgagtgttcttgatcatttcaaaattttgttgacacttctgatcaaatacaattggaccattcatgtttatacctcatgctgtggttgataaggagcttgaaggaaggagaatcagactggccatttatttgttcttcatttatgtttgtattgttagtgttatatttgaatcataaatttgaattctaggaattttgaaagccattcatgtttccaaagttagtatacttaaaaccagataatataatccataaacccccttagcatagaaccataaactacaatatgtcacttgacacaaggggtccagaaccccggggacgcagaccagtactggtctgtggcctgttgggaaccaagccacacagcaggaggtaagtggagggtgagcctcaccacctgagctccacctcttgctgtgctccacctgaggagtggagcacagatctgctccacagatcagctgtggcaattgcttctcacatagcaaaccctattatgaactgcgcacgcaagggatctaagttgtgtgctccttatgagaatctaactaatacctgatgatctgaggtggaacagtttcatcctaaaaccatccccacctcccccttccatggaaaaattgtcttccatgaaacggatccctggtgcccaaaaggttggggatcactgctttgcactaaaagcaaacaaatagatgaatattgttagctcctcgctgtaaaactcccattcttccttttccaaggacagatacagaacttaattgattcattcattcactcatccagtcagtatgtgtatgcatctaatatatgccaactgggtatatgacagtgaataaaccagacaaaaatgcttccctcttgaagctcttactctagtggggagataaagacaataaacaagataaggaaataaaatatatacataccatacataagctaagggcaatggaggaaaataaagcagattccagagtctccattataaaaaatacaacttttgcaaattggtctttagttcttattgagtttaaaaggatgtttcccttccacatccttcttcccactgtcttctgggatttttgcttcagatatgatggtcaaattgcttattataaattcccttctaagattctatgagttttaaatttgttttaattgttcacatgttgcattgaatgatgcaattgtactcttctagcacacagagctagtaaatttcctatatattgatatttaaagcctgtccttttatggagtattttgtgaccacctaaacccatgatgatttcttgtgtatacaccttcagtgcttggttcccatgtatttctctagtggtttcagaaaggtgagttttacattcctaatggattacagttcctaaaatccagtatgttcatactttctacttttattcctttccatttagtgcctagaaccatgccagaaaaagacataatttgactgtggatttaaccctcagatcacaaaccaatctcagagctttatttttttgctgagagttttaaataaactataaagtcaaatttaaacaattatcctttggaatcaacagaaccccacatttccttagctttccttagctgttcctattcccaaggatcacattcagagcactcttcttgagtgacagtgatgtgccaggtacttcacagaggtcatctgttttaattgtcacaaaagcccaagagaaagatactaactgttagaaatctagctcagaaaaagtagatgatttacctaaggtacatctagtgtgagtgacaatcagaacttaaactcaattcttctaagttgactgctgttttgattaaagcgcctgggctctcagaagtggactcttcctgggtgttagtcacaagggcttctcagaatttttctcctacatatgagacagcagatcatttctgcctctctgctaagataagccaagcaaaataatagattgtagaacaattaataatgcattcaaaatgccaaactcagcacactttctatcctttgtgaaaaattttgttcccattttgtccaaatgtctaataaaaatgattgtggaaaaataaaaacaatctttgatctgcctaaatgaaaataagaaccacaacttctagctctcagaacaaatcaaagttgtttttatttttaattaagtatgctaagcttaagtacattttctcttaaggtgtaattactaaaccatgatgatttctttttgtttattcatttaaaacacaaataaaagcagataatcaatagatcataatctaaaactagaggatttacaagttaataagcttgagtcaatagatattccataacaaagctttcaatgctgaacctgacataatttgctttgcactaagctggttgacttaatgctttaatttaattccaatattaactgaaaaatccaaagaaaaggggaaaatttaaatcctattatactgaaatatgttcaaagcaacaactcaatatcctgccacaactgcttaagtgtgccaccaaatgtctgcttaatcacctggtttctgattggtgataaccagttaacccgtttggagcctggtacaagtgaattgtggaagtttctcagtggtccattcatgcaatagcttttatcttagcctcaacagtcatcatattttcatctcataatgtctacttttcctgacttatggccaaattattggagttgtttttatttgaaaagcaatttctccttgtctcttgagattaccatccagcctgacctcccaaaaagcagaacagtaggcaggcctaggtcaaagaacagaagaaagcctttcttagttccctgaaaggaagatgtaagaagctatctgtatgaagaaatagcattagatggcatccatcatgcaaagtctggtagtactagtagaggtagtgagagggatgtgaggcaatatccagcataccttcaaggttatgagcacagactcaaaagacaggatccccccaggcaaatcctggttcttccccttacaattatatgaccatggacaatgtgcttcgactctcttttcatccatttccttatctgaaaaatgagggtcataatagtgtctatctcataaggttgttttaaggcttacacaatttaatatacataaagtacttgaaaagcactcattgttatcatcctttgagatactcttgaggcataaggaacttatgctaagaataattttgagaacagcagcatcagtcactgaatatagtagtcagatgtgtctttcagaagagttatgtgtgcacggccaaagtcctaaatattccatttgttaccatccttaaaatatcatttgtgaatttgtaactggtttttgctttgtgtcattgctggtcgactgcagtcagggtggcagtgttttggctgccccctaccatctttagttttctggtcccattagtgttgtgaccaagaacaagttagtgccctttgctcaagtaaatgggctagaagttaagcactgaccttttaccataggggacccttttctattctgaaagagaacttagaaaacagaacagaaatctcattgatttttacaatgcacattttttcatatttctccgtctctgaaattgcatgcatctaacaatcttataatcactgtagatggcagttgttacatacttgtcatttcctgtgcctgcacaaactctcgtcacttcacttgagttctgtgcaccgttggtacgacacacacattgagtttaattgccacttaaaatggcttcaaaaaatcatactatgatttggcattaaaataaaaagtatacacaaaaggcacagaaacagtcacttcatataaaacttaaaaagaaaaaacaaactatgcccatgcaagtctaaagaagtctttcaataagtataaaatacacatctaagtgataaaggaatcactgtgttcttgttgaattagcagcatatttttctctttcttagggatacataaaatagtttttaaaaaaataacagtgtgtttaaatagatgaaatcctggaccccaaaaataggtgtgttttataataaatatttttaaaacagctagcatattgccaataagataatgtatttaaataaaagataatttattcattccgcagacatctatagagcacccatatggtgccaaacatattttgtatccctagtccctgtcctctaagagttcaaggtctagtggggagaaaaggcaggtaaatagatcaatctaatataaaaatgccataaacagcagaaagaacagagaagagagacaagtaactcagtctggggagtcaagacactcttccaaatggagatgacattaaatttgtattttcaaggatggaaatacatcctttccaggcatagaagggcattctaagaaaagaggaaatcatgaacaaaagcgcagcctcattgaagagtgtgttgtaactgggtctgagtcatgagtctagggacagggtgtgaatgaaagaggcagaccagggagaggctaaggatgtgcccaaagagacaggctgcaggagattttgctggtaagggctggcaatcaaaaccaccctgcttcctaaccaggtctaggctctggcatcactctgacttttaaattaggaaagttagagcttgattcttgcacttgactctgtcaatgcattaggatctaggagagatggtaagtgatgttggaaagcagtccaaagttcataagcagttagctatttccatccaaggatgccatgatttcctctcctgaaactaagtgaacagccatgggtaaaaatgaactgaaggcagaacatgggcctctcatgtaaaagcagaagtaggggattcccaggcaagatggccaaatagaaacagctccagtctgcagctcccagtgagaccaacacagaaggtgggtgatttctgcatttccaactgagatacccggttcatcccactgggactggttggacagtgggtgcagcccatggaaggcgcagaagcagggtggggcgtcgcctcacccgggaagtgcaaggggtcggggaactccctcccctagccaaaggaagccttgagggactgtgccatgaacgactgtgctatctggcccagatactacacttttcctacagtcgtcacaacccacagaccaggagattccctcaggtgcctacaccaccagggccctgggtttcaagcacaaaaccaggcagctgtttgggcagacactgaggtagctgcaggagtttttttttccataccccagtggcacctggaaccccagcaagacagaactgtccactcccctgaaaagggggctgaagccagggagccgtgtggtcttgctcagtggatcccacccccatggagcccagcaagctaagacctactggcttgacattcttgctgccagtacagcagtctgaagtcaacctaggatgcttgaccttggttcggggagggatgtccaccattatggaggcttgagtaggtggttttcccctcacagtgtgaacaaagccaccaggaagtttggactgggcagatcccaccacagcaccgcaaagccgctgtagccagactgcctctctagatttctcctctctaggcagggcatctctgaaagaaaggcagcagccccagtcaggaacttagagaaaaactcccatctccctgggacagagcacctgagggaagggctggctgtgggtgcaacttcagcagacttaaacgttcctgcctgctggctctgaagagagcagcagatttcctagcacagcacttgagctccgctaagggacagactgcctcctcaagtgcgtccctgacccctgtgtcttctgaaagggagacccatcccagaaggagttcatagacatctcatacaggagagctccagctggcatccggcaggtgcccctctgggacaaagcttccagaggaaggagcaggcagcagtctttgatgttctgcagcctccactggtgatacccaggcaaacagggtctggagtggacctccagcaaactccagcagacctgcagaaaagcgccctgactgttaaaaggaaaactaacaaacagaaagcaatagcatcaacatcaacacaaaggaagacaatgaaacaaccccatccgaaggtcaccaatatcaaagataaaggtagataaatccatgaagatgagagtaaaccagcgcaaaaaggctgaaaattccaaaaactggaatgccttatctccaaaggatcacaactcctcgccagcaagggaacaaaactggacggagaatgacttcgacaaactgacagaaataggcttcagaagcaaggtaataacaaactcctccgagcaaaaggagcatgttctaacccaatgcaaggaagctaagaaccttgaaaaaaaaggttacaggaactgctaactagaataaccagtttagagaagaacataaatgatggagcagaaaaacacagcactagaactttgtgaagcatacacaagtatcaatagccaaatcaatcaagcagaagaaaggatatcagagattgaagatcaacttaatggaccagtgcaagaagattagagaaaaaagaatgaaaaggaacaaacaaaggctccaagaaatatggggctatgtgaaaagatcaaacctacatttaattggtgtacctgaaaatggcaaggagaatggaaccaagttggaaaacacacttcaggatattatcaaggagaacttccccaatctagcaagacaggccaacattcaaagtcaggaaatacagagaacactacaaagatactcctcaagaagagcaaccccaagacacgtaatcatcagattcaccaaagttgaaatgatgaaaaaaatgttaagggcagccagagacaaaggtcgggttacctacaaagggaagcccatcagactaacagtggatctgtctgcagaaaacctacaaaccagaagagagtgggggccaatattcaacattcttaacgcaaagaattttcaacccagaatttcatatccagccaaactaagcttcaaaagtgaaggagaaatgaaatattttacagataagcaaatgctgagagattttgtcacaccaccaggcctgcattacaagagcttctgaaggaagcactgagtatggaaaggaaaaacttctaccagccactgcagaaacataccaaaatgtaaagacgatcaacactatcaagaaactgtatcaactagtgggtaaaataaccagctagcatcataatgacagaatcaaattcacacataacaatattaaccttaaatgtaaatgggctaaatgccccaataaaagacacagactggcaaattggataaagagacaagacccatcagtgtgctgtattcaggagaccaacctcacgtgcaaagacacacataggctcaaaacgaagggatggaggaatatttaccaagcaaatggaaagcaaaaaaagcaggggttgcaatcctagtctttgataaaacagactttaaaccaacaaagatcaaaaaagacatagaagggaattacatagtggtaaagggatcaatggaacaagaagagctaactatcctaaatctatatgcacccaatacaggagcacccagattcataaagcaagttcttagagacctgcaaagagacttaaactcccacagaataatagtgagagactttaacaccccactgtcaatattagacagatcaacgagacagaaaattaacatggatattcaggacttgaactcagctctagcagatctaatagacatctaacagacctaatagacatctacagaattctccaccccaaatcaacagaatatactttcttctcagcaccacatcacacttattctaaaactgaccacataattggaagtaaaacactcctcagcaaatgcaaaagaatggaaatcataacagtctctcagaacacagtgcaatcaaattagaactcaggcttaagaaactcactcaaaaccacacaactacatggaaattgaacaacctgctcctgaatgactactgggtgtagaatgaaattaaagcaaaaatacatacgttcattgaaaccaatgagaacaaagatacaacataccagaatctctgggacacagctaaagcagtgtttagagggaaatttatagcaataagtgcccacaagagaaagcaggaaagatctaaaatcaacaccctaacatcacaattaaaagaactagagaagcaagagcaaacaagttcaaaagctaccagaagacaagaaataattaagacgagagcagaactgaagaagatagagacatgaaaaacccttcaaaaaatcgataaatccaggagctggatttttgaaaagattaacaaaataaatagactgctagctagactaataaagaagaaaagagagaagaatcaaatagacacagtgaataatgacaaagggaatatcgctactgatcccacagaaatacaaactaccatcagaggatactataaacacctttacataaataaactagaaaatctagaagaaatggataaattcctggacacatacaccctcccaagactaaaccaggaagaagttgaatctctgaatagaccaataacaagttctgaaattgaggcagtaattaatagactaccaaccaaaaaaagcccaggaccagaaggattcacagccgaattctaccagaggtacaaagaggagctggtacaatttcttctaaaactgttccaaacaatagaaaaagaagaactcctccctaactcattttataaggccagcatcatcctgataccaaaacctggcagagacacgacaaaaaaagaaaatttcacaccaatatccatgatgaacattgatacagatattctcaataaaatactggcaaatcaaatccagcaacacattataaagcttatccaccacgatcgggtcagcttcatccctgggatgcaaggctggttcaatatacctaagtcaataaacataatctatcacaaaaacagaaacaatgacaaaaaccacatgattatctcaatagatgcagaaaaggccttcaataaaattcagcaccccttcatgctaaaaccactcaataaattaggcattgatggaatgtatctcaaaataataagagctatttatgacaaacccacagccaatatcatactgaatgggcaaaagctggaagcattcccttggaaaaccagcacaggacaaggatgccctctctcaccatttctattcaacatggcattgaaacttctggccagggcaatcaggcaagataaagaaataaagcatattcaaataggaagagaggaagtcaaattatctctgtttgcagatgacatgattgtacatttagaaaaccccatcatcttagcccaaaaatgccttaagctgataagcaaattctcaggatacaaaatcaatgtgcaaaaatcacaagcattcctatacaccaataatagaaagagagccaaatcatgagtgaacttccattcacaattgctacaaagaaaacaaaatacctaggaatacaacttacaagggttgtgaaggacctccccaaggagaactacaaaccactgcacaaggaagttaagagaggacacaaacaaatggaaaaatattccatgctcatggataggaagaatcaatatcctgaaaatggccatactgcccaaagtaatttatagattcaatgctaccccatcaagctaccattgactttcttcatgaaattagtaaaaattactttaaatttcatatggaaccaaaaaagagcccatataaccaagacaatcttaagcaaaaagaacaaagctggaggcatcatgctacctaacttcaaactatactacaaggctacagtaaccaaaacagcatagcactggtaccaaaacagatatatagaccaatgaaacagaacagaggcctcagaagtaacaacatacatctacaaccatctgatctttgacaaacctgacaaaaacaagcaatggggaaaggattccctatttaataaacagtgttgggaaaactggctacctatatgcagaaaactgaaactggacccctttcttagaccttatacaaaaattaagatggattaaagatttaaacataagacctaaaaccataaaaaccctagaagaaaacctaggcaataccattcaggacataggcatgggcaaagaccttatgactaaaacaccaaaagcaatggcaacaaaagctaatattgacaaatgggatctgattaaactaaagagcttctgcacagcaaaagaaactatcatcagagtgaaaaggcaatctacagaatgggagaaaatttttgcaacctatccatctgacaaagggctaatatccagaatctacaaggaacttaaacaaatttacaagaaaaaaacaaataacctcatcaaaaagtgggcaaaggatatgaacagacacttttcaaaagaagacatttatgcagccaacaaacatatgaaaaaagcctcatatcactggtaattagagaaatgcaaatcaaaaccacaatgagataccatctcacaccacttggaatggtgataattaaaaagtcaagaaacaacagatgctggagaggatgtgaagaaattggaacacttttacactgttggtgggagtgtaaattagtttaaccattgtggaagacagtgtggtgattcctcaaggatctagacccagaaataccatttgacccagcaatcccattactgggtatatacccaaggcattataaatcattctagtataaagacacatgcacatatttattgtggcactattcacaatatccaagacttggaaccaacccaaatgcccatcaatgatagactggataaagaaaatatggtacatatacaccatggaatactatgcagccataaaaaagaatgagttcatgtcctctgcagggacatggatgaagctggaaaccatcattctcagcaaactaacacagaaacagaaaaccaaacaccacatgttctcactcataagtgggagttgaacaatgagaacatatgggcacagggaggggaacatcacacactggggcctgtcaggggctggggagaaagaggaggggtaacattaggagaaatacctaatgtagatgacgggctgatgggtgcagcaaaccagcatggcacatgtatacctatgtaacaaacctgcatgttctgcacatgtatcccagaacttaaagtgtaattaaaaaataaataaataaaagcctgggtgtggtggatcatgcctgtaatcccagcactttgggagtccgaagtgggcagatcacctgaggttgggagttcaagaccagcctgaccaacatggagaaacgccatctctactaaaaatacaaaattagctgggtgtaatggcacatgcctgtaatcccagatactcgggaggctgaggcaggagaattgcttgaacccgggaggcggagattgcagtgagccgagatcgtgccattgcactccagccaggtcaacaagaacgaaactccatctcaacaaaaaaaatataaataaaaaattttttaaaagcagaagtaggattacagaaagcagagaagcccaaaagatttgaatgttcactgacaaacacagcaataaagtatttgatattgcaggcttcatttgaagtaaagcttcaggaatacctggaaaccaagctacaggtggcactcagctccctaaccagcctttgccaagaggaggggtctttccagagacaaccatagagagtaatctttagccatgttatcgtctaatatcaaaaatagggggcaggccaggtgaggtgactcacacctgtaatcctaacactgtgggaggccgaggcaggcagatctcttgagcttaggagttcaagaccagcctgggcaacatggtaaaactacatctctacaaaaaatacaaaaaaaaaaattagctgggcctggtggcacatgcctgtagtcccagctacttgtgggactgaggtgggagaattgcttgagcccaggaggtcaaggctgcagtgaacagagatcatgccactgcaccccagcctgagtgtcaaagtaagaccctgtctcaaaaaacaaacaaacaaaaaaaaaagagggtgtaatggaagtgttttaatatgaccacggcatcctctcactgagatctgctaccatttattttattttgtttgtttagagacaggtctcactatgtcacccaggctggagtgcagtggctccatcatagctcactgtatccttgacctgggctcaagtgatcctcccaccttggcctcccaaaatgctggttagaggcgtgagccaccatgcccccatttgtaatttaagctgataaatgagagcaggggcacaagtctgtatccgctaactcttcagcaacagctgacccaaggccagcaaacccattgcatagccaacaaccaaccagatcctgtctttctgaagacacacagagacagtagtcagatggttatgactaataaggctgtaaggttgtttagactgacaattggtagccatgctgggcaaaagggaaagaaagaaaattaagagaaagggaaaagagagagaagtgccatgcagcccctgagtgacagagagagaaactcagttctgacagttttccagtttcaaaacccaaacctgtaaagttgacccttgaacaacacaggtttgaacaggtccacttacccatagcttttcttctgcctctgccactcctaagacagcaagagcaattcctcctcttccttctcctccttgacctattcaacaagaaaatggcaaggatgaagacctttatgacctttctcttccttatgattttcttaataactttttctctagcttgctttattgtaagaatgcagtatataatacatataacaaacaaaatatgtgtttgttgacagcttatgttgttggtaaggcttctgttattagtatcctgttagtagttaagttccgggggagtcaaaagctatgtgtaggccaggcacagtgggtcatgcctgtaatcccagcactttgggaggatgagacaggcggatcacctgtggtcagaagttcaagaccagcctggccaacatggggaaaccctgtctctaaaaaaaaaatacaaaaatttgggtgtggtggcacacacctgtaattccagctactaggaggctgaggcaggagaatcccttgaacccaggaggcagaggttgcagtggccaagatcgttccactgtactccagcctgggcaatagagagactctgtctcaaaaaacaaacaaacaaacaaacaaacaaaaacagaaagttatgtgatatgtagacgtttgcctgtgtaggacattggatcccctaacccttgcattgctcagaggtcagctgtagcttctgtacaggcttgggttctatacttgccttttctcttccttacaaaaccaatcaaaatgagtttcttttccctgtaactaaatttccttgactagaatattgattactgccaattcccacctttcctgtaagttgtaagttttagaatctggttgtttttttttattgggaaatacaattgatttttgtatgatcctaaaattgctgaactctataattgtttatttttagattctgtggaccttttaggtagttaataatcatatctcatgcttcaaaacccatgtaccttgtgttagaataagataggataggataggctctggtaacaaataaaattccaaatctcactacctaatgcaataaaagtgggaaagtcaaaggtggatttggctgcccttctccatcttatatcagtgtcagatcatgataggggaagagcatgctgcagagttctgcaagaagcttttaaggtccagacctggaaatagctgacattccttcttctcacatcccattgataagaatgtctcataacctctctatttaggggcagggaaactagcaactgcgaaaaaagtaaaataaatgaatatttggtaaattataataatctctgctgcatagctctttttatttccttatcttacattgcctaggattaccactacaataataaatagaatgcatctgtcttatttgttatattaacaggaagactgctaaagttttatcattaagtatgattttgctatatgagtgctgaatttttctcttgagatgattaaatgtaaaacaacttttctaagggctaaatcctatatggtcattgctctggactgaatgcagttgcccactccctttccaaatccttacaatgaaatcctaaccctcaatgtgatgttattaggaagtggtaaggggacaaacaagtgaagagacagatacactagagtataagatctatcaagtaataaaggtggacctgtgagtaaattcaaaccatttttctctcttgagtagccatgcttatgacaaagaaattttgaatgccttgtgggttgtttgtttgtttgttttgagatggagtctctctctgtcacccaggctggagtgcagtggcgtgatctcggctaaccgtaagctccgcctcccgggttcacgccattctcctgcctcagcctcccgagtagctgggactacaggtgcccgcaaccacgcccgtctaatttttggtatttttagtagaaacggggtttcacagtgttagccgggatggtcttgatctcctgacctcctgatctacccgccttggcctcccaaagtgctgggattacaggtgtgagccaccacgcctggcaagaaattttgaatgtcttgttttcaacaaatagttttaatttaaatcgaaaagagtgtgtaggtatgagttgcgaatttgtaattcatttgcgattctggtattgatggattgtcttatcttgtacaggtcatttgggccctatggactttaggctcaacaacaaaatcagacagttggagtacagtgccagtcacaatttttagactgtttaaccctaaatgtctttctaataggccttatttatatgagaacattttatagttaaccacaaatattttgtctgtgtttatcaagagttacaagcatagcagccctttctttactgaataaaagttcaaacaaattggattcatctttatttggagctgccaattaaagtgggatatagtatagttaagcagtactcaacatgtaggccactaatctcttagggtcccaaacactctttcaggggctctgccagggaaaaactatgttcatactaacagtaagaacttacatgtctttttcaccttcatccccttcatgagggtacactacagtggagttttccagaggctccatgatgtatgaggatgtagtcactctgctggctagtcgtatacatgtctcagtattcttttcctttaaacacttctctactttaattttcaatatggtactattgatcgatataaagatcagaaacaaaagttctttgggatcttcagttgtttttaagaaacaggggtcttgaaatgaaaacactggaactactaatacacttcacaagtacattttacctccacatagcacagaaataaaatcataaccctgtctcttgtcagcagtatgactctaggtaagacatttaacttatctaagcctcaatttccttatgtataacaatacaaatctcctagcttcatgtgaagatgaaatgggatacaccaagtctgacatagtaggagcaaaaactttgctcacaaataatctaccttaggaaggatagacaagaaaatggtaaactggttgggtgcagtggctcatacctgtaatcccaacaatttgggaggccaaggcaggtggattgcttcagcccaggagttcaagaccagcctgggcaacttagtgagaccttgtatccacaaaaaaaaatacatatgtgtgtgtgtgtatatatatatatatatacacatacacacacacacacacacatatatatatatatatacacacacaaaaattagctgggcatggtggcacacacctgtggtgactcaggaggctgaggtgggaggattgtttgagtcttggagacagaggttgccatgagccaagatcatgccacaatactccaacccgggcaacagagtgagactctgtctcaaaaaaaaattaaaaacgaaaagaaaatggtaaataaataacttttgttaccataagggaggagaactaaacaactggggcatgggggaggagatggggaacttttcattgttgctgcacccttcacttagaaggtccagtttatgaaaagtaataatttagttaaaaccttcaaaaatgatttttaaagaatttccctgctcctcatagatatagcctggtagtttacataccacttcattttctatgaagtactgttgttgcaaatttatctatgcaaagagctaagcatgcaatgattgttgctgtgggtataaaatactgctttgctaaggatactgtagctaactcacagttaattggctgaggcctgagcacacccatatcagtttgccatatacagatttttggttaacttgatttccatatgcaaagtgagaagaaagttctaattcatatatatatatatatgtaaaatatctttctctcctgagtcatcaatctctacctcattattgaaaaattgccatcaatataaaaatatactcctggtatctcccattttttaaatatgtgactccacgggcccctccagctaccatctcctgttcctgttcccctttacagtttacagccaaacttctcaaaagaatatattactattccctgtttctacctctacacatctgttctcccttccacccactccaaccaggtttctgtccttatcactccattaaaaggctcatatcaagacgatttgccacgaaatcaagagctcttcctatgcacagcttccttaacatttcagcagcatttgacactgcttaccacacttctttaaaaaataccctcttctctcagtttcaaggagaacacactgtattggttttcttccctttattgtcctggtctcagcttctattactgatttcctttcggctgctgtccaagtcagcctcatcctgcatctgccactgagtttggtcctgagctctctcttctacttgacctacactctctccttagactattcctagactcattcaagtctacttcttagacttcactctacattcgcttcttcaccccagcccttcagcttaaattctgtccatattcactgataatacaaatacttttgaacacttactctagcccagccacaattagaggcatttggggtttagagagaatgaagtagatgcaggcctttgactctgtggagtttacattctggcaaggaaagacagacaacaagcaataatcataaaaaaatatggtatgttagaaggtgatgagtgcttaagaaaataaatcaggataaaaagaatcaaaattgggaggagacagggaggagagtgggtcagttgcagttttaaagaagagtggctcattgagaagatgagctgaagttactcatgcaaacctatgcataaagtgggttgcaggcagagaaaacagccagtacagaggcctcaaggcacgagcttgtttagtatgttttaaaattttcaacaagactagtgtggctgcagtgcagttttcccaggggaaaatgataggagacaatgtcagaaaggaagtggaagggtgggcagaaagaacaggctttgattatgaataacttgaggaactagaacagggttttgagcagaggagtgacatgatctgacttgtgtccaaaatacacttttgctatgtggacaatgaggatttaaggttaaaaataggctaactggctgggcacggtggctcacacctgtaatcccagcactttgggaggccgaggagggcacatcacaaggtcaggagttcgagaccagcctggccaatatgatgaaaccccatctctattaaaaatacataaattagcctggcctgttggtgcttgcctgtagtcccagctactcaggaggatgaggcagaagaatcgcttgaacctgggaggtggaggttgcagtgagccaagaggctgcactccagcctcagtgacagagcgagattccatctaaaaaaagagaaaaaaaggcaaactgaggctactgcagtgctgagagtgggaaagtatggcttggatcagagtggtagtagtagatgtggtgtgaactggtaggattctggatgtatcttgaagttaaataaatccagtcctatttcctaatgagtagagtagatgtgaaaaaaaagagaaaatgaatccaaagtttttggcctaaacaactggaagaatgaagtcgtcatcaactgaaaaaaagggaagactgcaggtgaagcagcttttctaggtacatcagaatcatttcagtcagggagactgaacactatgggttttgagatagaaagtttattattattgttcattagagacagggtcttcttatgttgcccaggctacactcaagcttctgggctcaagcaattcttccaccttagccttccaaatagctgggactgcaggtttgcatcaccacacccagctaaagatgagcgctttctctaggaattagaccttacgcaattgtgggaatagctgggaaagtgaagatttggggaggagagtaagaagatgggtaagggagttgccaccatgcccattcaagaagccaaggatggccagccaccttagtgtccctaccacagatgcctatggagaggtctatggaaagcaactcctctgtttagctaccatctctgtggggccagcactaagtgtcaggtggtagacctgggccactattggttaaagagtcagcagctggaaagaagagtcagattggagtagaggagaatgaggacaatctggaacccacttgcacctctgtgtctattcatcttcacatctaacttcaaccaacttcgaagagtaatggccactgatttactttcattctccaaattgtatgtaaatgtatctttaatccagaactagatagagaagatatattactgctatatataacaaagtacaacaaacttagtagcttaaaaacaatttctacttgttatctcacagttcccctttgtcaagagtctcaggccttttgttcgaggtctcataaggctacaattagggtgtctgttgggctgtgttctcatccggaggtttgaatggagaaacatttacttccaatctcattcaagttgttagcagagttcatttctcttgtgtgggaatgagagggaggccctggcttcctgttggctgttggccctcatgtcctagagaccacctagttcccctccacaggggtccttcacaggccctctcatagcatggcagtttacttcttaaagaccagctgaaggatttcactttcagtctgctgagatggtgtctgccatatttatggcagtgacatcctagagttttgccattttctattagttagcaacaaggcataggccctgactgcactcagggggagggagaatcacacaagggcatgattcattgcaggggtcaccttaaggtgtgtctcccacagaaggaattctgagatatgcagtttcaccttaaccaatctgacataatacaaacttcaaaaaagggaaaatcaagagatcatatggagacttgttaagtttcagatgtattagacatccaaatgaagaggttaacaagacaattggatacaagactggattttgggagatatgtccaaggaccctcaaatgtgtattcctaattcagtctcttcccaaaactatagtttcattggtctgtctacttgacatcttgaacttaacaagaccaaagttgttccttcccttcccaaatctgttactgctcagacttctacatctcattaaatggtaccctcacctaccctttctctcaagaagaaaaacctaagagtcgtccttcattcctctctttcccttgccttctacattcaatccatcataattctattggttctacattcaaaatataaatctatccccttaattctatgtctaccattaccaccctagtccaagccactattaccccttcctggccttcagcaaaagcctttgaatgtctcccctccctctcttgacccatgttatgaaatggattgtgttcctcccaaaatgcatacactggagccctaacccccaaggtgactgtatttggagatagggcctctaggaaggtaattaagcttaagtaaggtcataaagatgggaccttcatcctataggattaatgttcttataagaagaagagacaccagagatatctctctgcatgcacacaaagatgacacggaaacacatccagaagacagctgtctataagccagaagagaggcttcaccagaagccaaccatgaagacaccttgatcttagacttctaacctcaagaattgcaagaaaatgaacttctgtgtttaaagcaactcagtccatggttctttgctatagcagcccgagtagacaaatgcaatggcctccatatattgttcacacatcagccagaatgagttcttcaaaacctagattaaattgtgtcacacccttgtttacaggccttcgatagttttccactgaaattggaatcagacttgaactctttaccttggcctccaggattgataccatctagctcctgctcatccttttgaccttctcttgggccattcttctctccatcacccagcttggtcgcactagctcctttctgtcaacaaaaacaccaagtctgttcccatcttagagtttctgttctgctcttgctcccaaaactttgtcccctgattcttcacacagatggtgtttttctgcactcttgcctaaatgtaacttcttcaaggacctttcttacccgcccttgtaatcaagaatttcattcactcttccccaatacctaagcccaaacactaattagtgcaccaccctacttattcccttcataatttaccacaatttccaattctctctctatgtcttgatctctctatctccctctgtttatatattgcccatttgtcctcctttataatgtaaaattcgggaaggtaatgaccttgcctcccttgctttctattgtatcctcagagattaggagcatgcctagtgtataagaagctctcaatacatgtgtgtttaatcaaggcttaaataaatctaaagctatggcccaaatgaaaatttttatatgagttttagtacagttttgccactatttccatagaatagattatcagagtgaaattgctgggtcacagtgtatgcacatttttaattttgatagatcagaagtactgctttttaatatttagtgtgactgatttgccactttaaaatttaattatcacaaatttaatttttttcctcttctcctttgaaaaatgaggcatttcaaaaccatttttcccccaatgtttttatggtaactgaagcatcattgttcattttgcaataactctagcttttgctttataggttaaattgatacagccaatttgtctataaagaaaatgtctgtgaattgagtcttctttttgaattgacccctccattacaaaatgaatgatgtattctaaagagaggaaaaaaaaaaccttctcccttttcacgtatcattcttcttttctgagtgtagagagttgttggagtaaaagcattaaagtgatcccagtgttaatatgtggatcctccaagctgaacattttaagtttgaaatttacaattgttataacaattgtcccctgcctaatccattaggtgacagcattagctagaacccagagctaggaatgctttaacacttatgagtacatttgagttggcctcattgttacccagtcgtcaatagtgtccttaacatttccagctgcctcatcactgtttgatatgtacaaggggctgggacaagggtgtagagggttccactcaaacatgtccccagtatcaggagaaaacacacttcaggaaggcatggttctgatagtgggtcaggaaagaaaataggaaaattggttttaacaccattcagttattatacttcctgcctcaattgaaatcaaaagaaaaatccttgtgtctaaagaataattacaaattttgaaatagagtgaacgttccataaagaaaattttaaatcttttttctaagaaaatacttttcctattaccttgtgcaaatggcaatctatacttattggctgaataataattgagttaattaattaattcctggcagatttattatttcattagtcactgaccatgatctataccacgatagggtgaaatttaaaagttcttccattattccttcaaattgcattgcagagctcttcacacataattaggtcttaaattttttgcctaatgttacttattgtttcctaacaaatgcagttcaaaaactttagagtgacattcacagccctctttagtcttatcacaatcccctttccagccacaatccctactattcccctgcaaccatcacacttctgctttgttgaactgccacccaggtatctccagaactttctactgttccttcttctaatccttcatctatttttatctgctcaaattctacatctttcctgacctggatcaaatgccacgtctcaattaagtcttccccaagtcctcaccccctttcttctgaataacaagtatttccttagtatttctctggtgcttattatagcactgccacactgaattgtgtgtatgtatatacattattgatttgctctattagattataagttcctcagagtcaagagtctgtgttacccatcttgtatcttccattgcaattttatagagtcttttgcataaaagatgctcaaaaatgtttaaagaagtaaaccagctgctgagaaactgctaaatgtttgcactgagcattttggcagctgtgtcatcccacttggtgatgctgcctagcacatacacactaaaacaataggcctgaacactaaacaataggccatggtcctaaagggtattttgttctacctttcttgtattgtgagttgatctttgattccggagcaactctgcatgtacgtgtttgctgtcaaaataaatgtcttttttgtctcaccagctgagatacatttaggtgaagatggcactggtaaaggaagtgtgcaggtgaagttggtgaaaatgttctgacaatgtttatattttgcaggcttggaagtctcatgccaagtgaaccatggataagtattcaagtttgatatttgcctaatgcgtggtaaaaaaataataataataatttctgtatcaagactgatttgatggccaggctctgtggctcatgcctgtaatcccagcactttgggaggccatggcgggtggatcacctgaagtccgaagttcaagaccaacctggctaagatggtgaaaccccgtctctacttaaaatacaaaaattacctgggcgtggtggcgggtgcctgtaatcccagctactcgggagactgaggcatgagaatcgctcgaacccaggaggcggaagttgcagtgagctgagattgcgccattgtactccttgcatttcagcctgggcgacgagagtgaaactccatctcaaaaaaaaaaacaacaacaacaaaaaaaaaaaactgatttgaattttgcaaaatagtattagacataaatatgttgatcaacttttggggaacttaaaggttaactttataaatggagaggaaaaatcgtcctgcagaatccacgcctcaaattatctggctttcaaaaatctagaaaaatattttgtgttgatttgtctacattacgacatataaaagtcatccaattgcctggatgtactctatccaaagtcatggcttttagataacagttaatgggagctcgaactgcttctcacattttatttgtaatctaaatcagaaactctaggtctcaggtataatcattccttatcattaagacaaaataaaatataattaatgataaaggatctcggcagttcaacttaagaatacagaggttaatatacttaaatctagattcttctgaagttctctttgcacaaaaaggtgaatttttgatgtgacttattctctggttcttggtattcatcataactaaggaggcaagggaaccccgtgacttggttgggatgcagaagccaaaactcatccatttcaggataaagagcccaggataagggagaatcataaatgaaagacaaagccagaagaaatcccactggcttagaatgaagttgatggtgaccaggaagattaaccctttccaaaatataatatggacacgtaatactctgttgatgaacacaagagtgcctatacatcattgttttggttcattactgggagcagggtaaaaagattcctaaggtctacagtaagtgagcttagtgaaaatacaccccaaagaccagagggaaagctctggaaactgctggatcatcagatcaatagactcaaagatgactaagttgggaagctttatgcagtttaaacatttgtgcagggagtatccccacacagccttttattgacagctacagatcaatggtaatttttgatcattttcaacttacataaacctattgaccccatggccacctttggggcacttcaagtcatcaaaaataatcagaggagatggtgtaaaattgtcagactgctgaagactccaagtagttgcatatgtccccaggagctgagtcgagaggttaaaatatagttcaaattgccagcagaacctcaactgacagagtgttccagagagtcttgtctttatgtctcataaaatgaggcactgatttgtatccaaactctgaccttcatgcatataaagttaaagaaggaaaaaagaggctgaatcccattgaagatattagattgcaaagaatggattattcctagtaaaatatttcttcctgtttttctttgttgagtcatcttcttcatctgctgcctaacaaaagtagctgacatgcttgtagaattacgtacaatatggacgtggacatagaatgaacaaagacaaaacagaagcaagtgcaaggtggcaggccagaagtcagggacaacaaaaaatgtagtcaaaaaaatcattaggaagagtgaaaggaaggaaagagcaaaataatggcaataaaggggaagaagtaagagtattgaattaagataatctctatagaggaaaaggagtgagagaagaaggaaagggtgaataagaagaaagagaaaggaagaaacggaagaaaagtgaagcaaaggagtaaaaggaaggaaaatcgtctttagtgatgacttttcctagttagtaagacagaacgctacatctccaaaggaaggaactgaatccaaaacatctaagatccacagtgctcaagcaaatatcctaaatttaagaaaaataacaagaaacttagtacgtaaatgagagccaacccaattcacagagtgaactgcatccaaattttgcagcaggattctaaaatagtgaactttgatgttggaaattcattcaggagagaataatataaattatttcctaaaacgtcaaagaataaattggcaaggattatcttgtcatttttatgttttcttcattttttaatatagcttttactaaacattgacaaaaaccatggctattgtttagatctatttaaggagtctatatgtggtttgtgtgtgtgtgcgtgtgtgtgtgtgtgtgtgtgtgtgtgtgtgtgtgtgtataaaactattcaggaataacaaagtagccagatgcagcagtggcttgcacctgtaatcccagcacttttgcgcagccaaggcagaagggtgacttgagctctagagttggagaccaacctgggcaacatagtgatacccaatccctacaaaaaaaggaaagaaagaaagaaaagaaacattttgttttaattagccacacacggtggtacatgactgtagtcccggctactccagaagctgaggcaggagaatcacttgagcccaggagttcaaggctgcaccgagccatgatcatgccacactccagcctaggcaaaagagccaaaaaataagaataataataataaattaaataaataaataaataatgtaatatgagaacttgtcctcagtataatttcatgatacagaaattacttttacatcccaacatgtggttatttctctcccttttttttttagatacatgtagaccaggttaagcaaaacaactgttgtaatgaccctttgtaggagtatacccctaaaaattttctgtgccaggcatgcatgaacttcagcttgcaacctacaggccatatttctatattagatggtggaggtttggaagctagggcattttgaatacttctgctttcaaggatctgagccgtaaatgtttattaaacgaatctataatgaaatcagttttgttatttttttaatggttgcctggagtgtgttggatgactgaatgccagttgttaatcattaagtactcatgttaccaaaagtgtttgatagtattgccatctaggggctgaatggaattctcagctctgaaataaattataattgagcaggtgcagctattgacaatatacatatgtttttgctttatagcccacatgcttttcatgtttcttatgacaaaagcttatgaaaaaatgtcccccagcagcccaccttttttatatataatctgttagaggtgattactatttgctttggagcgtatgcttttttggcatctattactgaatattctgaacaaagaattattcttttttgcattattaatcttgcccatgtttgccctatttccacagaaaaggaatcatttatcagaaaagagtgtttgtaatcgggacttgtagcatcttcagatttaatattcattatggtcattctagttctgtgctatatttatctaaaaggccaatccaatgttatggagaaataagtttttaaatatttatgatctaacttttaatattttaaaaaagagaaattagtatttctgtaaaatttgtttcagagtctgattgctcagcaaatgtttaaatattaaaagatttcaagaggttagcgtgtaatatcataatgggacttattgaaataggaaaattgactttacaagtttttgatatgtgaaggaaattgtattttctctgcctatgtttaacacataacaagaaataacacagttaaaatatacagccaataatgtcagaaaacagcaccaaaacctatttctacattgttttgtttttgtctaaccagtttgtttggaaaacaattctgtttgattttgtcatcttgttttagattttatccaaaatgatatttggatgcccccacacataattttttctgatgttcttgggtgcctactttcagaaataactttcactactccactttatattcttcttcccttgttcatcaaggaaagaagacaattgaagaccatgtatcacattcaaacatctaataaaccaaagcagatcattgaatgtaaatatcctactaacccagtcaaaactttctcatgatttcttatatccaatggggatggtacgcaacagaaaatgccagtgtgtgtgtgtgtgtgtgtgtgtgttcgtgtgtgtgtgtttacctatgaacacattactaccccacttgcatacataattcctactttaaaaggacatatcctttcagtccagatgtggaaagagcaccccagggcctttagaaacattaggattcttagctccagtttagttatgccaaatatgttaatgctgctctccaagcagaaaaacaaacaaattttaaaaatcctaattaggctatccctttttttcttttcttttaaagcaacaaagaccaaattctccaagcctagctaacaattacttttggtaggtttcatagttttacttatggtgcttttaacaaatgaaaatatttttatatctatattaataatagacttctctaagggtgtttgtacatgtatagttgaattggcttgttactgttttcttgtgtttatttgttttattgaattcgtaagatatatatacatgccaagagaatgagagagggagactgggaagatggagagtcttgtgtacaaacagatttggaaattaggggtgttcaggttaactctccaaacccttaatattaacctggcaggcaattatcccagtctcagacatgcagcttggcaccactgatttccattttgagctggatgcagcactgatctgaagcatcatgttttgtttttttttttaatgtttatatatcacacgctttgggctgcaagcactgaaaagtcaaggatgctatctggtccactttctgagtgtctgaaatcatacaacattgggtaatatattcacggtgtcaacaagaataagaaaaaatgcgttgttttcttaatgataattcaaaactctgctgtagtgtttgcgctgctgttgcctacaagctttggccatgaggttcagagaatgactttccagcaatattgtcagtttcaaaaaaaaaaaacaacaacttaacctgttaattttcttacagggaacaagccatcaagcccacctgtacgggttagaaccattcacaacatatcgcattggtgttgtggctgcaaaccatgcaggagaaattttaagcccttggactctgattcaaaccttagaatcttccccaagtggactgagaaactttatagtagaacagaaagagaatggccgggcattgctactacagtggtcagaacctatgagaaccaatggtgtgattaaggtaatgtctaccctgcataagaaattatgtttggtgttctccagataaatagatgagccctgacatgccatcaggtcactgtgggaaaactcccttcacagcctgtttaattctccttgatagctcctccaggcacttaatcatagatcacagaaacctagcttagatgtgtgatgcttcctataacccaacactgagctaaatgctctccatggattatctcatttaatcctcacatcaaccctactaggtgggtaccaccaaacctcatgaggcatatgcaggctaagtaactgcccaagcctacactgtaagtaattgagttgggatttgaagccaggaactcacatcagaactgaactctaaatgactgtgttcttactgcctcctgaattaccctacccagttatttgcttaagacttgcctaatttatgcttcaaacagagctcattaagcaagccacaggtgtctgctaacttcccaacttctgtatgtagccgtgagaaacaatgttataaatgttgtatacgtatctcaagctctgccagcccatgagtacagggggactgtattttcatgaatagcctgcattttgatgttttgaaccttcagccacacaaaaaccagccttcatctacctctctgatgttcctccccaaggatggtggcagacatacctgttagttcatactactgcctttacctccagtctctcctggccgtggtccatctcttaggccctcatcaactaccttctgcgggctgggactgcagagtcccccagcctgcagctgctatagacacactacccttttctttgccactccttctccaagaggcagactcccacatcaattccacatcacagggttgagactaagctgttacttttaataaagcctccctgaaaaccctaagagagggatgacagcaggaaattacgtgcagcaataactaagaactgtaactagagctcacagtcccaggtccatcctgtgggctgcctctctgcctagcttcaaggcctgctgcaagtagcagtagcaagctgcttcccaccagcctgcctacatgtggacagaagccagacttctcccccctggggcaagaggcttgagccttaggattcatgaccttaaaatccaaatcacggccccaaggcacccatcagaaaagaaagctccttttccctcaaagcacttctccttgtgggtatttggagtcatgagagcatctgcttcttggtggcataattgacaataagaatattgactccttggacctttatttacatttcaccaaatattaagcaaatatttggtgaaatacttctactaagtgccatatacttattcaagagtgaacaagacagtcaggttccctgatgttacagaccgtgtgtgagtgcacgtgcgtgtgtgtgtgtgtgtgtgtctgtgtgaataaatgtggcagagtatatgaatggtgggggtacagaaaagcaaacaataagctagtaaataaataagcaagggaattactgagagcgatgaatgctataaagaaaattaaatagaataatgtaattatgcctgctcaggctattttagaatggaatatcatttgaatcaagttgacatttgagctgagtcctgaatgacaagacagagttagtcatgtgaggatatgggggcaaaatgttccagacaaaatgaacagcaaatgcaaggcctgaagccaggaatgaacttggtgtattcaaggaaagagaagaaagctagtgtgtatgaagtatttgggagaaagaaagatggcactagaagaggttggagggactggtaggagacagattgtcccaacattgtaggctgtggtaaagtttagaatttgttccaagtgcaatgaaaaattactgaaggctttaagcaaaggaatagcatgatcaaatttacgtttttaaaaatcactctggctaccctgtggaaaatggactatataaggaccaatggagtttgagaactattaaagatttcaaggtagaattgaaggtgggtcaaattagagtagcagttgtgaaatcatgcactataggtgaatcgaagatacattcagaagatagagatgacaaaatgtgttaatgagctgaatgagagacatgaaggaaagggagcgctttgagatgagttttgggtttaggctttgggctattgatgaggaaggggagactggaagatgaacaagttaggagcaagtagatagtgtgaggtacaagtctaaaactcctgagagtgttctttgctgggataaatgttcagaatccgttagcaggtggatgttatataaacccatggtgccagaggagatcagctatggagagaatgtaactcaacctgttgagagtctgggatcaagccctgaggcataaatgtgggggtcaagaggaggaaagagagccagcaaagactgataagagggaactaggctagaaggaaaagtgcatgagtggagtgtccaaaaagagaagagaaaatatgccaaaatgttgctgagagcagaagtaaaatgaaggcagagaagccaccccgagtatagaaatgaggaggtcactgtgatctcgacaaggagagtatgcagtagaatgggaaacctggttggcatggctggttgaggagagaatggcaagggaggaagtaggacatcaactcattaaagccatttagatgaaaagaaaagcagagaaatggagcaataggtggagactgtgggatgggaagttttatttaaaatcattgaaaaatactagagtacatttaaacacgaatagaaataaccagtagagggagataaactggtgacgtaggagataatgagaataacggcagtagtgaagtcttggggaaggaggaagggatgggatacagcgcttaggtggccttcagtaggtacagagatatttcattcatagcaaaaggaggaaaagcaaatcatgtaagtctagattcacatggatacagaggtcagaatatataacatggaggcattcttctctaactgcttctattttcagtgaacgatgtggttatgtcaacaatcaatcaacggtgagggagggaagagggtgttagtggttaggggaaaggaagaaatatgaaataatcacctgggaaaatgacagagcaaaagcatgagggaataaaataggattacaaattggtaatcgcctatttaaaatgtatggatagaagtttaaagtgagaccaataaaaatgtttgggtgtttttctacaaacccatttcagagcttgagtatagagggacagctaaattttacactaattagagatttgccgggtgaatatcaggggcagcaaggggtgcttggggggtcacagaggctgcaagctagttatggaacctatgctcccttcagaagatatggcagtccccttcccacatgggggtggtcttgccctgggtcctcaacaagaaaatcacaccaacatacaacattccaacataaagaggtttccaaacttctaggctgtgtaatcttagggaaaaaatggagtatgttaacaatttagtctaaattaagcttgcccaagaaccacttctgggaatgtttcaagggtgtgccttccaagggctgtaaaatgtgtcctgtcccctcttgagagtcaccatgatagggagtcatcgaaaggagtgtgtcatctctctcaggtttgttggagcaggaaaaggttggaaaatcactgttcaaaaacacctgcattcagattaacttacttcccatctttcaaaaaaaatgaaaacttgctctacatttgtacagtataataagcattcagatgtttttttccagaacaaaagactactttgcccccaaaggagcaatcagttcttccatggcctggaagagaaaacagggtgtttttttccatcccctagtcataaagatttatatacatgtatatatgtacatgtatatatatgtatggatatttgtacttatgtataaaatataggtgtctgtgtgcctaaacacacacacacacaagcatactctttcagccctggcactctgtaacaacaaatgattaagcgttgtaattccatttcccagcaaatgccgtggaaggtagaccctactttagtcagtatgagatcagaagcagttcatatccataaaacaggagactttaatactattctctactttaaaaaaatacaaataggagaaaccttgtgaataccatttaagtcaaagaatctgattcaatagcccttagttttgagataaatgtttatgtagttcccaaactgaaaaaaaagaaaagaaaaaggcaaagaaaaacattgtttgtctctctgtgggccttatgttaactgaaaaaaatcacatatccccaattaatatcagaatacttcttctaaattagggtcatcaaaataaggaacaagggggtgaaggttaaaaaggggctaagtaactacacaaagaaattgtatgctgcaagttatcccttttgcttctgtccttctgtagacatacaacatcttcagtgacgggttcctggagtactctggtttgaatcgtcagtttctcttccgccgcctggatcctttcactctctacacactgaccctggaggcctgcaccagagcaggttgtgcacactcggcgcctcagcctctgtggacagatgaagcccctccagactctcagctggctcctactgtccactctgtgaagtccaccagtgttgagctgagctggtctgagcctgttaacccaaatggaaaaataattcgctatgaagtgattcgcagatgcttcgagggaaaagcttggggaaatcagacgatccaggccgacgagaaaattgttttcacagaatataacactgaaaggaatacatttatgtataatgacacaggtttgcaaccatggacgcagtgtgaatataaaatctacacttggaattcagctgggcatacctgtagctcttggaatgtggtgaggacattgcaagcacctccagaaggtctctctccacctgtgatatcctatgtttctatgaatccccaaaaactgctgatttcctggatcccaccagaacagtctaatggtattatccagtcctataggcttcaaaggaatgaaatgctctatccttttagctttgatcctgtgactttcaattacactgatgaagagcttcttcctttttccacctatagctatgcactccaagcctgcacgagtggaggatgctccaccagcaaacccaccagcatcacaactctggaggctgctccatcagaagtcagccctccagatctttgggccgtcagtgccactcaaatgaatgtatgttggtcaccgcccacagtgcaaaatggaaagattactaaatatttagttagatatgataataaagagtcccttgctggccagggcctgtgcctgctggtttcccacctgcagccttactctcagtataacttctcccttgtagcctgcacgaatggaggttgcacagctagtgtgtcaaaatctgcctggacaatggaggccctgccagagaacatggactctccaacattgcaagtcacaggctcagaatcaatagaaatcacctggaaacctccaagaaacccaaatggccagatcagaagttatgaacttaggagggatggaaccattgtatatacaggcttggaaacacgctatcgtgattttactctcaccccaggtgtggagtatagctacacagtaactgccagcaacagccaagggggtattttgagtcctcttgtcaaagatcgaaccagcccctcagcaccctcagggatggaacctccaaaattgcaggccaggggtcctcaggagatcttagtgaactgggaccctccagtgagaacaaatggtgatatcatcaattataccctcttcatccgtgaactatttgaaagagaaactaaaatcatacacataaacacaactcataattcttttggtatgcagtcatatatagtaaaccagctgaagccatttcacaggtaggtagccatgtctcggttttctgagagtaagccactgctgacctttctattgcctgagcccttggtcagttctaatgaagactctaaaaatgggatgcaaggtgtccccaacctccatccacctaaacgtgcatagtagacaaagcacatcctcacccaagcaaagcctgcttgcataacctccagagagcagaattctttcaggtgatgttttgagagtcagtgtttcagaaaggtttgcaatgcatcctggtatctgaaataagtaggacagagatgaggctagtccccctggaaatacgcaggcccctggacagttctgacagccccgatagggtcatctggccagactgtgaagaaaatgatgtattattttaaggttaaaaagtgccaatcaatgagcgcaattaccagccagagttagactaaaacaaaatttgtttcgtgaagagccttcttatcaaatccagcacttcttccaggaataataaggcttctctgactctactttcttatggtttctcaggacagtgccactttgctagctcatgttttcctagcggtcccatctgggctctgtgacatgcatggaagtgcgttgttctccacacaaaagaatcttgcccattgtttaaataattgtttggcagttttccccatcacattttaagtaacttacatccccagagagaagggtaataagagacattttatgcttaaaatttagtaaaatgaacagaatcacttaaaaaaattaaaggctgaaagagtgttgatttccaactacctcaggtaaaattcagctattattgtaatctagtgatgtgtagattagatcctcctataattacctctgatatatagtgctgttgaaatgaaacattcgtggttttatgcatctactcatgacaattatttagggtctattaaatattaaacagtaattaaaacttcctcaggtatcctctgcagctaatccacatgctatgtgagttggcttttatattaccttacactgattcagggcattaaaaaggtccactgtagctgcagagctgtatattctagactggcttcctctttacctgactgtacctccaactttcaaaaaccatatcaatttgctcccttttgaaactcttattcaaaaagtattctagaggtgaaagagtttgtccaggcatgaaaggaatgctttttccaggctggaaagaaaagtttaatttatctgataaattgcaaggatatttaagaatgtgagagaaatctcttcattatccactctaactgaatctgtaagtggcattgacataaaacagagtatcacttctatatgaagttggagttcatgcgtggttttttgtttttgtttttagtggattaatgttcactgaatattgcaaatgtgtgtgtcctcctttcagcacccccagctggtcagtaagaagaaatagtctgggaaagtcctaagtagcagaaggaatccagcccaaaatttaaaaactaccacggataacccagaaaatgaataatctttatgtgggaaatcaaaattgacttcacagaattgcttagaagtcagatctaccatacacagctatggatttgatcaccaataaactggtagccctgtcatggtggagatcggcatgagaggagaaccaggggaggaggagaagaaagtgggaataaaataagtcacaaagggaaaaaggtgtaattaagaaagcaaaaaggtggaagagacagaacatgtacaagaacagaaagcagtgattcaaagagcaaagaggggaggtagaaaatagaagaggaaaaggctagaactaaaaggaataaaggtagaaagaagatagctgggtgcctgcgggaaaattgaaggtgtcataaaatcaatggtggttgggaatagagaaaaaagtgctcatttacagccataggcactaaatactcacaaaaactcattttgttggaaaggagaagtccctgctatgtaaatagaccttttcaagtagcagagaccagctatgaggcaaaacataattgattagttgaatttaactggatggtgataaggtgtcttcatgattgataatctggtgtgtagttgggttaactttggccccgcaaggtctttgtatcatgtaagggaggctgttttaagctgttaggtatcaggtgaggggatttattaccactgagaccgtaattccatgatgttccttcatgacctggaaacattcctgggggatcattccatgatgttccttcatgacctggaaacattcctgagggatcatttagctctagctgcaaaggtaggagtccaggactgctgagaactgcttcatactttctaaggtctgcattcttcattgctatgttaagtaattctgaagagtaccagaattttcatgccggaaagaatcttgagagttatttattccatacatccttgtttaggggaagaattgcactcacccctttcgaacagatcaggaactttagtttagaaagccagggggattttgattgttcaaaaatttccatggaaatataatttttttttgagacagagtcttgctctgtcacccaggcgggagtgcagtggcgcaatctcggctcactgcaagctctgcctcccaggttcaagccattctcaactttgttattcttaagaattagctgtgaataagaatacatgtaagcttgtcttttttttttaaggcctggtgttttaaagattcttcccatgaaaatctattttgctgaaaatcactaatttctgccttatgtcctgaaggtatgaaatacgaattcaagcgtgcaccaccctgggatgtgcatcaagtgactggacattcatacagacccctgagattgcacctttgatgcaaccccctccacatctggaggtacaaatggctccaggaggattccagccaactgtttctcttttgtggacaggaccgctgcagccaaatggaaaagttttgtattacgaattatacagaagacaaatagcaactcagcctagaaaatccaatccagtcctaatctataacggaagctcaacatcttttatagattccgaactattgcctttcacagagtatgagtatcaggtaagaaatgtgtattataaacaattcgagctgattgtttgcacccgtcagcacctgcctgtaaaaatggtgcacaatttgaaaaggcacttaaagaaatgtaggacttaaggagaataataatattccttaaaaatttttaagtggtaaatgaggaaaaaccatgttcattgcctttttcattttcttggtttttgagccatattatatacgttgtttttcttaagtagattccaggtgaatttgcatttcttattagtaaagtggtttctgccattaagattccctctgtcagcgttgccttggtaggagacactccttatttaaagatcactttgaaaataactcattactcgtaccaaaataaaatcaaatagcaaacatctctagcctcggtgctcaagaaagatacagaatgttgaaaaaagtctagaggaatacaactcacctgcccatggcgatgagttaagttttctctgaggatggcctaaaaaaataagactgcattcttaaaaagccaagaattaagaataatattcagaaaatatggtgaattctgtggaggacttctgttaggtttgttttgttttgccatcagagtccatttgcattcttcttgtgataacaacctcatttcctgtgggagaatgtgcttcccccaccctttgctcaggcgtggtgggagtgtcaatcaatgtgtcaggctgtcttctagccaagtggtgggcacatgagccgctcagcccctcagatttgcctggggcttgatcttcagcagagtgactcagaattttaaaaggtggaggtgagaagtcgtgataaaatatccctaacctcaatctaaaagtttttcttttccctgctatttccaagcatggttcttcaaccgttcttttaattccataaactcacagtaaattctcatttgcttaagtcagaatcagtgcctcttgcttgcagtcaaagaaagcttactgactgatgtaagcacttaagtgccaggaacaatgccaacagaaattttctaaaagaggaaactgagccttaaaaagcttattataacatgaaatactaaaaataataagtcaccaaaaagatagtgaccaaatcaatgagtacagtgaatacagggaacattttaagcatgaaaagaatattttaggacaataatgtatgggacaaattaccgaattaataagatttaaaaatataaataaattctcgaatggtttggaaaaatacacagatataaatccataatcccttgtttgcaattccaagtctaaaaatctcttaaaagtattttcttgctttaccacaagtcatttggcaacaaaacccaatctaaacagacttgagactatttacagtatttatttatcccatttaatatgaatatttatatgttttgctacaaaaatattgctttattataagatggctaatcagatcatggtatggatattacaaaatatacagtatatacattttatcctatttcaaaatctaaaaacaaaattattttaaaacacatcaggcccccaagggtttaggataagaattgtggtttatgtcataaaggaacaaaatacttaccgatgccaccatcggaaacgtaacactgttagaaacagccagaacctacgtgcctgcccttttgttcttttctcattacctttattgagaagtgtcacgttatcaagctgtcagttatctagtctcccttacaaataaaaatggtaccttcgtgagagagctggatgaaatcagcataaaatcttcagccgctaattaaacgcaacttaatgacccatatataagaaacacaaactttctctggtattgtgttgtgtcattgggttaaattctggtcacatgatctgtggaagtctcattccagtttttgtttgtttgtttgtttctttgttcgagacagagtctcgctctgtcacccaggctggagtgcagtggtgagatctcgagatctcaactcactgcaacctctgtctgccaggttcaaacgattctcctgccttagcctccagtgtagctgagattacaggcatgcaccaccacaccaggctaatgtttttttgtatttttagtagagacagggttttgccatattggccaggctgatgttgaacccctgacctcaagtgatcagcctgccttgacctcccaaaatgctgggattacaggcatgagccaccatgccaggccccatcccagttttctatggaatggaaagctccaagcatgtgccttgtctctagtcagatttttcatcaggcactaaggatgactaagaacaaagggacccacatttcagaggagaggcaagttaagaaccttaggctgtgtggtttcttttgtaactgttactatcggctctgtgttacactcctcctccatactcatctcactcaaatgaaagtatttaatttggtttttgatctccaatttttatttattagctaatcccacgtagttacaacataaggatagaaaacaaagaaaatcaaaatctagcttagcccaaaggcccagttcttatggaaaataatattttgaaaagcatagattaaatgctgaaataaatgatcagaaaatattagtttcatttagcctgtgtaaatattgagtctatgtggaccctgagtaatcttacagaagtcatttaggaagttatatactaaaacaatttatttttctttaacaaaagagcatttttgtatttgtgatgaatttgcattgctctcaaaaccacttgagggttacttcatctgcaagtggcctttgaaaataccttcattgtcctatataaatctgctcacccagcaactgacagtgatttcacccttctgcagaggagtgtgtttttgaggtaattgtagattgtagggaataaaaacaaagacctgagaaacttcctagcagtggggaaggattaatcagaagatcgtgaggatgtatagttggggaggttgccacccacatggtgtgccttgcaagtatcagctggggctccccaccaccttcctacactacattacatcattgtactcatttctggttttgagttaaatcattgaaggcagttgttaaaatttagttatgtgaaaagaacaagacagttttcactagtctaaatcaactcattccatcagttggccagtgatagaagagggtatcgcatggataagttcttttgtttttctttcttcttttttttttccttcttctttgtttttttccttcttcttctttttctgagacacagtctcgctctgtcacccaggctggagtgcaatggcacgatcttggctcactgtaacctccgcctcccgggtttaagcaattctctgcctcagcctcctggtagctgggattacaggcgcccgccaccatgcgtggcgaattttttttgtatttttagtagagacggggtttcatcatcttggccaggctagtcttgaactcctaacttcgtgatccacccacctcggcctcctaaagtgatggatgagttctaacgggcaggagggtcaggaaatatctggagaaatggatacttatagagagggaggagctactcactgcagaaaaccaaagagggaaattaaatgagcagcaaatgtcactcacctcaccacaattcatataaccagcttgataactagctcctttgaaggtgagcaaaatccatgtgatatcacaagcaccttctaagtgttcactaatacttcaatatggaatgccctaaaggtagcatccccactgtttacagtacaagtggaggacctaagagcttgttcaaagggcagactcctgggtggaatgggaagggaccccagcaaccagtattttttttctttttttgagatggcatgtcactctgtggccatgctggagtgcaatggcgcaatcttggctcactgcaacctccaactccccggttcagtcaattctcctgcctcaccctcccaagtagctgggattacaggcacacaccaccacgcccagctagttttttgtatttttagtagagatggggtttcaccatgttggccaggatggtctcaatctcctgacctcatgatccacccgcctcagcctcccaaagtgctgggattacaggcgtgagccaccgcgcctggcctagcaacctgtacttttaacaagcagcctggatagtccacaacccacttttttttggaaatactgcctcagagggtgagacattgctgctatgctacttaagccttattttcaagcggtgattttctgaatcagtggttctcagctttgtgcattagaatcacctggggaaatttcacaacattctgggtgctgatacccagtccccattcccctgtagttctgattctgggatgggttctggaatccctgcgattcaaaaggttcccaggtgattctcatgtgcagccagagttgagaatcactagcctaaactgtcataaacagcccaaataagtgaagccagctccccacaaatgcctaatttacatgatgatcattgataatagcctattgacgttggtctatcctggctttcctaaagaagggtcctattgttttgatgtgaaactagaaaggagaacagaatatattatctacaaagtccatgtctcagctactcatataatttattttaatcttcctcatggattttatttggattttgttattgttgttttattttcttttgtttcttacttgggaggtccggtctttggtggtaagagtaaagttcaccatcatttaaaacaggggatttttctagtttgagtcatttcagcatagcttccagaattctgggattctgaaggataacactctggaggattagctttaataaagccagtgagatctaaaatatgaatcaaaaaattaggaatattactttttcttgttttccacaagaatgggttggtggctttacagagtgcactgcagggtcccattagaaagcaaacattctctgtgaatttcaaatgcaacttagtttaccaaaatctaattctcaaacaaccctgtgaatgtatgttccatgcataaatgcgatgcatctgtactaaataaaattcttccattgcacagacctcttccttaaacagagatcacagtcttgcttgtgctacagaatatttacaaatccaagaagatttttttaaagacaataatcatttctatcttcaaccctttcaaaattgggctattctaatacatgcagtgtgaacctccaaattctatgtggagcagttcttaactgtttagcagcaaattaagacaatatttttcccacaggctttgagagggacctgggtgtgagtctactctgttaagacattttggtttttacctttggggagtgagctgaggctaatgaatagctctcagtaattgtgcattcatattcatactcttgcttaaggcaaagactcaccacggatttgatagggcccgccaccaccccccctttcactgattcatgctgtcagtgacttaattagttttcctgaaactatctcactttgacagatttttgcggtaagcacccacgcacactcagggtctctgaagcattctggtgcctcatgactgggtgactgagaagcagtaggtcagtcttagaggaaactctgtgactcatggcatggggtctgaacttagggctagtgctgcaggagcccatgcagaatggcagtctgctgctttctaacagaccaacactgcccccaaacaagaggatggaaagaagggctgtggaggagacacagaaggggatcctcactgttgctgccagtggcagctgcctgaagactgccagaggtactgtggaggccttccctgcaccagcccccaccataggctaccaaatcgttggcgatgagttagaagtgggagggagaaaggccaacatcttctactccttctctcactacttctggatatttgagcacattaacctctttgggcctttcctcataatataaattaggcctgctatgatggaatatcatagactgggtggctttaaataacaaatatttatttcccacaattctagaggcgggaaagtacaaggtcaaggcacctgcagattcagtgtctggtgagggccaccttctggcttacagataatggtcttctccttatatccacatataccaggtagaagaacactagtccccttcatgagggctccaccctatgcaacctaataacctcccaaaggcctccataccatcatattcaagattagccttcaacatatgtatttgaaggggacaaaaacagtcagttcatagcactcatctataaaaggaagcaccctccagctctgtattctatgggcagagtagtggtaagctacaggtatataatttttagaaagtctaatcaaactttatcttctcttgattggtttttgtaatctacagtttgtaaaaccctacaaaataaattctcacccaaagcaacagaattttctaatggtatttagctttaagttgtgttgatgcaagtgaatgtatgaaatcagcttcagataataaatggatatatggttattcatcaccaagatggacacatggaaatataattagttgtgtctctcattgaaacctaacatatttattcactaatatattttttaaagtatagctatattataacatatgaatgtaaataaataataaacttatttagttagctacaaataagtctcatttatgttcctgagaaaacccacactatcaaaaagttgtcatgactatttcactacaagtaacagaaagccaatgtaaactaagttaaacagaagggaattgtttctgctctcgcatctgggaagggcattgaaggaatcccttgaaaccaaagaaaagatatgaacaccaggtcctggaaacctgggatgcaggactcggatgatgtaggattcattcattctgtccctccttgccccatctcagcttgtctctgtttggcttcattctgcacactttcaccaggcatctgaggaaatcactcccagattcaagccctttctgtgcatcagttttcttgtctttaaaatgtgaatagatatagcattggactcataggcttgctctgaggttaaatgagttaatatgtgaatgtgcttggaacagcacctcatacatagaaaccacttcgcccatataacaataatgattattattattacccatccaccttagagtggaaagaggactataagtcaaccaatacaggactctgactgatccttttgcactacctgccttcctgtgaaccaagagaacagaggactatgattgagcaggtgtggtcgcagggcccacctcctacaggcagggctgcatgaggtatgcgggaaatgcttccagccagaagcaagaactgccctagcacgctacacacaccaaccacgggaacaagtactccacacctgtgagatattgacaatccttgtgctctttcacattggatgctcacacccttcctgttttccaaatgaagaagctgagttaagatcacatagcttgtgcaagaaagatacttaatttctgataacttcacctttctcatttaaaaaaatgggtgtgttatgagaactaagaaatctgtgtgtctagtaggatgcctgctacttagtaggtccatgcccccatccgatccccccaggatctcactagttaaaagaaggagaaactttcattcaagactgtaaaaaagccaggttaagacatttcttttgtctatatcaacaagtcattgataaaatgttagagtgtaaaaatctcaatcaggagtacagttgcctctaaaggtgtgatactccttccgctaggaagttcaaccctcctcatccttgccatttctcttctcagaaaaagagtaatttacccacatacccatgactaaaattccaaactctgatagtctgactctacttttatgcaattagctacttgctttgtattgcctgttttctattgctgtcacccttaccccatctcttttctatatcacatttagagaaaacatattgaacacattttctgtttagttttggacttgcatttaattaggtattaatctcactaatgtatttccgaccagcatggaggtttttgtctggttaatttctcccacaagaactaagctccccacacccaccccaactcccacagctcaaggttttaaatgatttattgatattgtctgactcaggcagtgtatttattctaaaactttagggcctgagtgcacaggttagactgaaggccactgggacatttccatgtatagaaaactaaagttcgccactaggcccagggcctgatcattttttgcatcgagccttttgttcccacgggagatcatttccacctgtcagtgtgagcacattcaggagcatgctctaattctttttgttcttgttccatctctcatggcaacccttaggactttattctgaagcttctgttgttggcaatcttcatggcgcctttgggacaagttatccatgtgaagatgggttggttctcaccctcttgcagatgcaactcagatttatatttcacttaaggtgatgttgatcttcctgtctctgtgttggaagtttgtttgctgaaaataaaatgttaaacacaacagatgctcttcaactgaatgtagataatatgccattccagcctgccctcatggctcttcagatggccatgaaaacaaaggctcccaaagtcacctaaaacttaggtcctgtaaaaacatctaggaaagggtaagatgtgttttacttattttcctccatcctgtaaattgagtatttaataaactgtccttattaagcacctacaatgttcaaagtgtatacctagttactaggattgaggcaggaggctaaaatccatgcactctccccttcagggacttaaattatagttgataagtcaaataaagatgcccatgaataatgtatccataaaaatatggctaggaacgttgatgtttgcaggatctgagtgatggcaaaacagacccagggaggaagaagcagcttctttatcttcagggacagcacgatttccacaccaaactctaaaggccactcttattctactctctggccagatggttttgtgcaggacaggtggcaccttgatattaaagaggtacttgactaaaatcattccacagagacatgaaggggcaccatttctctgttccttcagtcttacaaaaagaaatccctttctaaatctccatccttatgtttagaagcctctcttagcccacctactgttattggtacccatgtaatggttcaaaatattctccactgtatcaatcgggatctcagcaggaaacatatggcacattcaaagggtatttgaagaaaatttaatgaagaggctatttatggaggtgtgggtagaattaagagaatcaataagggatgttgaagtacccagggagtaggaagagccagaagctgttaccttctaggcctgcagggacaatggaagaaagtgggtcattgagaggaaattcagccttgtcaacatgcagtgccaaagagaggagcaggagaaacaaagaacctgaactctctcttccctttgatcaaaacctaatggaaaggagccagaggagaaaagattccaggtgaggcagtctgatgaagtcagcattccagagtacagaccaagccagagaagggcagaggatggatctggggaaaaaccagctcgtcccccacactcagattgatgctgcttctcaaccagtatataataatgccttcaccagtagaatcctttctgggctagaggatcacctggccagctttggcttgtcaatctatgattattgataaaccactaagtaaatctgaagacttaaggaggattgtacttaagtacttgaaccaacagcttattacctttaaattgtaaataaacatctcaggatatatgaagcaatctaatctgcaggtggaaacaaaaatgttaacacattcaaataagtcagatgccttaaatggtaatttgtaagaacatagttgagacttcttcttgttaattgatttatctgttgatggagctgatcattactaatatgcctataagcatctagaaaactgtacggttctctctttgattcctataggcatatttctaatggaaaccagtaataaaattcttttctctaaagaatccattgaattgctctaattttttcttttgttcatgtttgaggactttttgagaaattttaactaattataaaacaaagtagagaagccatccaattaacaaatttcattgtagagcaatatttttgaaaagccaggcttttatttactctaaccctcaaagctctacagtacagaagtacctggaagaaagatacacagggaggtgtgggctaaattccaaatgctgtggggagttttccaatcttattaatgtgtaacaactaactggaatccaggagtgagttgcacaattgctatctagccccactagatcccccaaactgttaagtcattctctcctgtcttttcacacaaataatgtgatagtaatcactattatttatttagggtttgctgtgtgctaagggctgtgttaagaactgcatgtatattaactaatttaatctcaaacaaccatttgaaataggtgttattactgacactattttacaggtgagaaacatgaagcattgaaaaattagataccatgcccaaggatatagagttgataagttgaaggactcaaattcgaaccttaagattcagtttcaaagactggtttcttaaattctaccccaacagttacctccaaattgcatttgtatgcagctttgggactttcaaaaatcaatgaaatatttataaatgtattcatcccctaccccattcctcagaaatttctagaaacaatattgcatgtaaatcttaaaatagtcctgtgggatagatgttgttatttcttagcatagtcaagaacctgaatgatttagcaagttacctagtcaaaaagcaacagagtcagaactcaagtcctgactttctgaccccaagttcaaggtggctctgctgaactgcagcttcttcaagtcacctctatcaggagcacaaattcctgaccctgtgaagacagaccgattagggttgcagtctaggctacatgaattaccaattctggatcctcagctattaatttaaactcactaaacctcagttttcttatctgtaaaattgagattaaaaaaacaaacaacaacaaaaaaaacttaccccaggaaagttgctgtgaactttaaataagttgactttaaggctagggtattgtcacttacaaaaaaaagtaaaatttaatatataaatacatagaaggtgttcagtatccagcattcctgcaaaatgaaaatcaaataaagtcactctcctactgcaaaccctacttcccccattccataagatgcaaactcctctctagttccatgaggactttcgtggtctcatttttgtccaattctgtcctcatcccattgctttccggcccttactcactaaggtcagccacactggccttcttgaggatctagccttaaggcctttgcacatgcttttcttttccatagaatgctcttccctcagatcttcatctggtactttctgccaattgtttcccagcttgatggtcatctgttgagagaacctcctggataagccaaccattttctgctctatcaccttatgtatatcaccctacaatctcatcatttcctttctagcatatatcctaacctgtttattttatttgtgtttttattgattgcctctcctcaccaggatgttaatgccagccttgttcactgttgtatccccagctcatagaacagcatctggcatatagaaatggctcagtcaatatgtgttgaattcatggatgataaatggtcttacctaatttactatccttcacggagatgttaatcacaattggtgattgtgatcttagcttcttctagcaacttattgtggataaagtatatattttaatgctatatccattagggtatagttattattgcagagaacataatggaatttcaatgcatttacacatgtttgaacaggatgaaatatatgagtagtacttgcttctgtgtaatatgcaatattgctgaaagcatgataagtggcacgagagatggatgtcacgttgtttgtgatagtttcccctgtctcacttttaggctaccctccacagaaaaagccagtccacgcagggctctatgaaaagcccaggacagcaacccacccatgtggaaggtgtgtacaggccttcttttaatggccttatgtaggaagatgtaaagagtttgggcttttatgtcacatatctgtattggaaagccagccttaccacttaccaagttgcataaatttctgtgttcctcagttttctcatgtgtaaagtggggataataataccaaccatataggattgtcgagaggaaaaatgcaaaattagtacatagaatacacttacaaaagtgtaagtgctcaataaaccccaaaactacttttacatatcctccatgagagtcggatgggggtgggttcctgtttcctcttagggagagcagatataagaaaaaaaaaaaagtatgtgataactccaaattttgattatttagttttattgttaaaagtgaatcagggttgggaggccaaggcgggcggatcacgaggtcaggagatcgagaccatcctggctaagatggtgaaacaccgtctctactaaaaatacaaaaaaattagccgggcggggtggcgtgcgcctgtagtcccaggctactcgggaggctgaggcaggagaatagtgtgaacctgggaggcggagcttgcagtcagccgagatcacgccactgcactccagcctgggcaacagagagagagagactctgtctcaaaaaaaaaaaaaaaaaaaatcagggcaaatttcagtatttcacagtgttaggtcagtttttccttcttcaggtattagaggagaaccatattcacaagtattaaatggctccaaagagcaaggcggtatgagaagcagtagcgacaagacacccaattctagcatgggaaatgtcttgttatttttccagtagcttcacgtctctgaacttcaaaagtgctcatggaaagcaagacaatgtcctgctgtaccctcttcccctgggtcccagaattcaattaaaatcacgttctatcttgcctaatccaaagtgttttagatgaagggaacctggaaaacgggactatatctgtaaaagtgtgactgtattgtatccagcaaggttctatgcagatagagatgctggaaaacatccatttgatggtgaaagaaaatcagatagatagacagttaaataaatagctcctagagcttttcagcacattattccttcataactggagcctgcagggctactcatgaaataaaacaatcttgtaatcatgtaatttcaaattcattgcattgtcttttttgccaacattctttaaccgcgattccagcaaagaagatttcagcatattgctattcaaacatattcaaaacctatgacaagctaccctttaagaaggcattagcgtgagtgccatgggaaaatgtactccaaggttgtagatgaattgatatgatctccttgattgtatctttttatttatgaggcataatttctgagcactggaaagcaaactgcaatgagtgatgactaacaacaaccaaagtcataaatcagcagcagtgaaagaagtagtgattttgatcgaatctattgaattagctgttggccttagccaatacaggtattggaaagacctttttaatatctatttgtccccctcatgggaatgtgataacaatctcattacatgcccctaggaaacaaataatttaattgtttgcccgttaacatacaacctgtttacttattaattactggcatagctgttcatgctagattttttgtttatttctgatgtgaattgttacaaaattatgttcacattccttagtttttataaacaattatgtctccttagagcttcttgatataaatttgtcctcagaattgttgaaatgctttttttaatcaaatattgtcattatcccacaaggaagtatgttacagagtttcacagaagttgcagagagctcagatattcttccctctcttaatctctgacagttaacacttttactaatacaactcttgtaataagcagcctggataaagaacaaaaatctcaaattgctccaagcgtaaagacagtcatcatcacttacattaggagttaacagattagagatcttttgtaaaagattaatcggctgaatttggttactcctgtattacaattttatgaggagaataatagcaaatgtaagaccaaatagacatcagcttggtgctgacccatatacaaaccatccataaaccatatattatgaagtatgttcccttgatttgaacaagacttgtagcattgccttggccaaaagaatcataaaatattttcacaatttaggggtttttcttatgataccataaaggaaaaatgcatcaggaacccccttgaaatgtacattaataacttagctttgctgtaagacaatacttggaaaacatcagtcctaaggaaggttatttcagaaagatatgagacattgagcgaggcaaagcattaaggtgaaaactactttgtttagccaatacaggcattagaaagacctttttaatatctatttgtcccccttatgggaatgtgataacaatcttaacaagttaagtgtggaaattgtgctaaaaaataactagcacaggccgggcgcggtggcttacgcctataatcccagcactttgtgaggcggaggtgggcagatcactaggtcaggagtttgagaccagcctggacaacatggtgaaaccccatctctactaaactacaaaaaattagccaggtgtggtggcaggcacctgtagtcccagctactcaggaggctaaggcaggggaatcacttgaacccaggaggtggagatcgcagtgagtcgagatcgcgccactccattccagcgttggtgaaagagcgagactctgtctcaaagaaaaaaaaaaaaaaaaaaaaaaaagaataactagcacagtaacagaagcatccaaagggtcaccattcttggagatttctgatacatttccccttctcccatcctgtgcagactgatggtcccttctctttcccattcacaaaaattattacaatgcttctgttcacaaatgtttgcttttctcctagaataaaattaggaggagaaatgttgggttgagagaaattgggagcatttagaataatgttactctgcactgagagaaaaatagactcagcaatttctagaaatatcaaggtttcaagaaattactccttaagtgaaaattaggaggcaagaagtggttctacaaagtcagtaaactctagttctgtttggaactgtgaaaaaacacagtaattaactctatgatgattattgaattgtgacatattccaagatacatttattgtgtttatttgaatgactaaagttaatgtgaagtataactctaaagagacataacaaatagaaattgaaaatgtacagtgcctatattctgtacctggctctataaagaataggcctttgtatttttcaaataatattgggtgtaaaaagcgcttggaaatatgttgaaagggcagagtccaaggtcttctcaccagaaattctgatacaggtacccaaaatcattttgatgaccatggctaaggaatatattgtgacaaagacttctcttaaaagaagatttctaagaggcaattttcaagagagaacaaatgattaaattcattgttttcacagcaatgtgattatggcagcttagtggcagatgttgacactccatgtaattaaaaatttttaaggcaaaatacaataattagtcctttggggtaggaaagagtaaataaaagaacaatttcatttttttaatgaacaacaagcataaatatggtaatagtctctagttagatttaaaaatatattacattgaaaacagaaattccattgaaaactgacatattaatctatcattttgctagttaattacagaatttgtggctaaacaattttagtttttatgcttattaaaagtagttaatctatgttttctatgacattttacattgtaactttcttcatggttacaacagaaaccttagagaaataaatcaacaagtcagtcagtcctaacttttcattattaacgactagggaagtttctgactctacaatcataactgtgtgtgcacccactcattcacatgtgaaagtgttcaccaaacccaaataataatgtatttcagcagcaactttaatcatctttaatcttttattataaaagaataaatatgttcagtctatgagaacacatggacacagggaggggaacatcagacacagggaggggaacatcacacaccagggcctgtaagagggtggaggctgggggagggatagcattaggagacatacctaatgtaaatgatgagttcatgggtgcagcaaaccaacatggcacatgtatacctatgtaacaaacctgcacgttgttcacgtgtacactagaacttaaagtacaataataaaaaaatatatatatgttcagtctaaacactgtaggaacaaaaatatcctgaataaatcaaagatgaagaacatcttggcttttttttctcttggccatagaatttataagccttacttgcttttcttccccaataataactcttccatttttctaggagaagcccacacactaaagaaagagaaaatacacaactgtttgttcacaagatattttatttattgatttttatatgggttcattgcaactaaaagatcgggacatattgctaaaaagttttctatgtgggatctctgctgcttctttctctaccctataaagacagaatcgaatcttggggcattgtttctcagtgggaatcataagcataacctgttagtatttttaccctgaaccctgaactacacttcaatacttttatctcttgcttagccgggcatagacaaaaatccacagtgatattttagacaaagaacgtttttacctcagcagagacagagacaaagacagagagacagaaggagacagaaaaaatattattcacaggttcttttttccttttctcctagtggtttgatataacagagacactgcctcatcatacaagttttgtgaaattcataatgcttcattatctcagtcagctttctcttcattctgttttcattttcacagtagctcatgtaaataggttgatcctgctttgcataagcatgttgatttatatgaatgctattttgatctcaaattgattgaatactaaaaagaaagtctaggaaaaagagtaatgtattatgaaggactcctgccaaagacaaaatagcctgcatacattccctattagtgatggggaattttgaattgcctggttttcaaagagaatatttccaaggaaatatagcaaaacactataatactgaggcccaagtgtttttaaaatccagggattaaatcacattttggaactagaactccacctagtagaagttcacgtaacacaggaaggctgagatttagtacaatctacgacactaccattaaaaagccttaatagtatttatgattctatatctacattgaaaatgaaagaaaagttaatgttcataagccagagccagaactgtgctgagcacttgctatgaattatgcttatttcatctcattttctttcaacaccctatgcctgcactacttccatctcctattggtgcacagtaattaattggcaagttgttgaatttttcttttattatacctagttgcactttcttcctcattttcctccccatccattgtagcctgaatttaaattctgcctgcgctcaaatcaccaaccaaagttctgctcttggcaaaaaacgtcatatcaatatttgcaccttactttgcattcctttgtcaagaatattgttttaaatcttgtcattcattgtgtaataataggtgtcccccccaccacttcccagaaagatatttgcagtaaaagaggttgttctggggcacagtgaggagacaggaaccctcctcatcagccctgaagtctgacttcttcatgaataacctccacctcccctccctagtgtaagtctgacctcacctatttctgaggggactctgagagcagctgcagttgtattctgatggatggactctaacttccatgaaatctggctctcccattgctagctccttacttccctgtgcttaccaaaacaaacctccctcacctaagacaacttgtacatgtctatccatccttgcaagctaagacaccttaacctaatctagaattgcaggtattcgtctatggacaagtcgtttaattttcatgattctgactattttatttatgcatatggatggcatacagaatcaaaaaccctgctcattgaaacaggcactggagagcagaattcttgtttcagcacttgtaacttttgtcaccttgaacaagatagtgaaattttctgaggctcaatttcctcacctttaaaaggggactagtaatacattctcggctcaccttacaaggtttccattggaaggactaaataagctgacataagttaaagtgctttgtgaaatgtagagtttatacaaatgtgagtgattattatgcaaatgatgagaggatgtatccgagctctaaaaagagcaggtgtatctatgtaagtaggttagttgtctcttttaaaaaatgaggctcctggcaatcctatcagcaaggggctggagatttgcatttgacagcaacctgaaaacaattcaacatcagaaaatttactttcacaaaggaatccggaaaaaaagaaaagtatgaaaaccactgataggagttgacctaactactaaaaatctgtctaatgtttcttctcttgaagatattattgatgcaaaagcaaagtaaacaaaaatgaaactaaactctcactgcaaaatattctcataggttttttctttttttcccccacaaatatctcctattttgaacattctgcatgctttttttttttttcaatactgcatgcctggaatgtgtgtactgtagaatcaaacaagtttttcagatttgtctttaaaagctcgggggcaaatttttagaaaatatataatgtagaagaaacacaatgagaaaaaaatttcctgaagttaggctttcacatgaaagcttactaaggaatactactactcctaaacacgcagacagtcttcttgtattgccatttagatctatcattctgattgatcactgtgtagttggctattattgggcctaatttaaccctatacactcacacatccatctactctgtctattgtacctgacattctacaaattacttactcatgcaaatgacgacctaaggcaaccttttaggatattcgtgtttaattatacaaatggttcttgataaataagattatacatcgttccatatgtttattccctccttgatgaaaggaaatttaattttcatgcagatttggtggggacaatgtttaagaattgctgagttttttgtagtctgcagatccatccagtctgcagaagctgacaaaatcactccacttcccacacagagatgagcagttttttcattaggcttaaatcaacgtgctgcattctgaaatcctaaacggccccctttgtgttcacatggtcaaaggcaaaaggcaaaaaataaaaataaaaaaggaacagcctgctctccttgctctcctgtgtgattacaaggttgcaagatcaaagtttatctcttcctgttgtgtttagttgcttttggttgccaatttcgttttttttcctttcttttttttttttttttcccagccttagggtatcttgcttttgacagtcttgttgatttctctttggaggtctgggcagtgaattctgcaggaaaagcccccagtagctggacatggtgcagaaccgggccagccccaccagaaggtctcagagcccccacgttccatgtgatctcttctacccaagcagtggtcaacatcagtgcccctgggaagcccaacgggatcgtcagtctctacaggctgttctccagcagcgcccatggggctgagacagtggtgagcagcagagctaaaaatccaggactggttgacttttaaaaatcattactatgaaacctttgtttttatgtttttgtttttccctccatctttcttatccttctgttctcagttgctctacggtgaacttagtagcacaaatatccctcagagaagaaaaagtgaaccctgaggaaacatacagaaagtatgtaaactcttagggagagggatgctaaaggtggtattaaagactccacaaacgtaagaaactaagactttaaaggcaatcacactaatttaatttaatttaatttaattagaaaacagatcaaccacttagagtggtggcacatagtaagaagttggcaaatggtaattattggtggtgtaaatgttagtatgaaaacaaaatagagcaaagaatatccttggaatctctattttgacatgcacaaatctctaataatacatggaaaactctcattcctctggtgatttcaagaaagttctaaccctttagaagagagagcagagcagctccatcagcatagccctagctccactgtttgttcgttaacacgtttgaggcacactgggagacaggagagattgctcagggaaatcatctttcacattgtgcgttagccaagccacttcccggaagcgatgctaagaatcaactagaccagttcctgcattatttaaatgaagataccagcagccagcacgatgaagactcttgtctctgtggtatagcttgtgtcactctcaagtttctcatgaataagtggagattataatactttgttcacacaaacattgtatagagattgtgcagatcctggtattacactatgcattatttaggccaatttagggaacaatttgggcaagtgtggagaattcctctgagaccagagtgtcaggtattgaaacacaatttcaacagataacttacatacagggaggcttggattgaatgttaaaggaatattagcatattttctatagggcttcgtactcaataaatatagatgatgtaaatacaatcaacccttgattatccatgcttataaaatgataataaactaaaataatttatatttggagggcattgtatgcattttttaacagctcttcttaatcatatgttctttatgtcaacatgaacattaatttcagtttctgaactcttgttccgaagagtacttattaaaaccacaatgaggttaaaaatttgctcaaaataaaccaaaactttataatcctacaaagatgattgagagaagactatgatattttgtaaaaaccaacaccctcagaggaagagatagactttcaagccctccaatacttatacctgattttaatgtagatctgaaaagattttttgactgagaaattgcatgcaagtaaccatggcagaatatggaccttggtgaatgctgactagacatataattggaaggcagattttgttttttgaaaagacatcactctgagggtcatagactttgatcaacactttgtgtgttccgtgccattttctaatacctttctaaggtaatagataatcgataatattatgccttgtgatttccatcctgctacctcaaacgtctatttaacggttacattatcagatttttcacctatttgtcatacctctctaactgagttggtaattttttgaggataaatgtcatgctaaatgccatgttgtgtctcccagagtgcctggcatggtactccatttgtaggaggtgggatcttggataacattcatcaaacacctttaatgtttgacactgcctttatctagccttccttccttccacagctatccgaaggcatggccacccagcagactctccatggccttcaagccttcactaactactctattggagtagaggcctgcacctgcttcaactgttgcagcaaaggaccgacagctgaactgagaacccatcctgccccaccctcaggactgtcctctccacaaatcgggacgctggcctcaaggacggcctccttccggtggagtccccccatgttccccaatggtgtcattcacaggtaatgggtcaggcagaaggatgaagaaactaacaaggcatgtgtacagacatatgaactcatggtatagcctactctgcacctaggctacaaacctgtatagctacctggcactccccagggaggacttgcttattgaacagatatctatagcaaagtagacaaacaaattgatttgagtggtaatgttacctgcgatgtatttaaatcataaaagcaactaatgatagaaaggagaacaacgaaatgttttacattaaaaagacaatgcaatgtgttcgtattcaatatgctcttcctaatggttatctggaagcattccttctaccagccttcactggaacataagatacctccacagttaaatcagaattgccctgatctaatttaaaatattgtcataaaccactgtttgaaaggaaaaagaagacacttgactcaaaatcatttagaaaaaaaattatttactctaaaaagagaagaaccatttatgtctctcctcttaaaagagggaaatgtcttatctctaccaaaaaggatcactagttgctgggtaaacagcaatgtgtgtgtagatggtgacttctcttatcatttctctggttacatctgctgctcgtttccaatagcattacataaggtgtttctgagagcagtttcctgcaaatggaaattttaaagagcctgtagctctgtgaaaacaaaatgtctcctcacaaaatagaactggttttaaaagagagagttaaactaattccattacccgtcttgactctacgtatccattctcattttagctatgaactccaattccacgtggcttgccctcctgactcagccctcccctgtactcccagccaaatagaaacaaagtacacggggctggggcagaaagccagccttgggggtctccagccctacaccacatacaagctgagagtggtggcacacaacgaggtgggcagtacggcttccgagtggatcagtttcaccacccaaaaagaatgtgagtataagtggctgctaccataagccagagagattggaatgtggtcaggagaagcttgccctgaaactcggagaagccacttttaaaaacagattgagtgggctcaataacactgaatgttactgaagcattgatgaggatgactactgaggaaaaatgcctactggatttaataatatggaagtcaagggaaaatttaagaaggattttcttgtggggatagggtaaaaataaatttaggggaagttaaacgatcaatgggaagaaagaaaatgaacaaacactggtagaccatttttataagaagttttgctactccttttctttgtaaattacatggcataatctctagtatgtccagagagcattgagacatagcactattaggaaaagcaaaagggcaagtgagtgaaggaaagagcaatcaactaattaattgggggcttccttacatttttatataatacagtcacgcatcgcttaacgatggaaatatgttctgagaaatgcatcgttaggcgagtgtcgtgaaaatatcatagaatgtacttgcacagacctacatgttataacctactctgccccataggcatgtgactgtgctgaatactgcaggcaattgtaacacaatggttatttgtgtatctaaacatagaaaaggcacagaaaaaatctgatataaaagataagagggccaggcacagtggctcacgcctgtaatcccagcactttgggaggccaaggcgggtgaatcacctcaggtcaggagttcgagaccagcctgaccaacatggtgaaaccccatctctactaaaaatacaaaaattagccaggcatggtgacacatacctgtaatcccagctactcaggaggcttaagcaggagaatcactttaacccaggaggcagaggttgtagtgagccgagatcacgccactgtactccagcctgggcaacagagcaagactccttctcaaaaaaaaacaaaaaatgtaagagatggtacagggcagctccattataatcttatggaaccaccatcatttctgcagtcttgctcaaaatgtcattatgagatatatgactataacttagattttataaggtatatgctttcattgtttaataatggcaaacacaaaaagtattaagaataataagtgcttatcagaaccaactgcataatttatggagtccagtggaaaatgaaaatatggaatcctttgctgaaaaatctttaagaattccaagacagtaacagtacagcatcaggctaagtccaagactcttctatgtcacaggcccttgcaacagcacaggtcacatgccaaggaagctggtccagcttattataccccaacccagaggcaaccactactaatattttggcataatcaattcttttaatctcctttctatgggtaatttttactatatggctgaaatactataactaaaatttcatagtcagctttttatacttgacgttattgtatttgcatttcccgtggcattaaaaaaactctttagccaccaattttaatggctatacaatattccatatataaattaattgggacattttgttttttttttaatttcccattaataaatatgatgaaaaaatctttgtgaacagatctttgaatgtctggttatcttcttaaattaaattttgacaaatagaatttgctattaatacatcaagtattttaatattttaaggctttggatactagtttcatgtttgctttcaagaaagattatgtcagattataaatcttacctaaaatactctatctggcattgaatatgatgccaattttaaaagcaagaattacgcattcataaagaccaatgtctcacacaaggagcttaatgtgtctgagcaacaacatggtaggatgttagtaacagatcacatttacagaggacttgtttgttcctggcagtattttagcattttacaaataattcttacaacagacctattattatccaaatttacagatgaaaaaactgaggcagaactataaactgtgtactgcgattccaggatgccattcatatagactatgatctgaactgaggctcttggagttagacagtgacgtggccctaaactaaggccagagcttaagtaacctggccagtttccacatctagtaagtgcagtaattactctgaactcatggtcactgagctcagctgctgtctcagtactactctttccctgatcaattcatttcctactctctgtaatcaagacttcaaaccatctccaccttcgccaaacctccctctgccgctcaccctttctcccttcatgcccacaacccagctcacccatttctccctttattctctgcagaactccttgtcttgtaattttccaggaaaagagatgtcttcagtcagtaatttgctccacttcccactgcagacaaagctacctgcatataccccattgctgtcagtgacaaggaaagggtggtccttcttccgtctgaaataaacctgccttccatgcagtgaacttcatccacttcattactcaccatcccttctctctccttaatctttctgtgtatctcactttgattcaaagttccttctacccttctaatgttaaagcaaacaagctcctcttcccctgcagtgatgtggactctactctctctgacagcaaaactttcctgaggaacggtctgcagatgctttgcccatatcctctcttccacttactctttaacttcctcagcactggatgaaaatccctttctaagtttgcctttggcctccatactgatatatccagaaggcatgtttctccaggagtcaccttcactgactttccagtagcattcaacgcaactgaactttcaatgttcaatccttttttaaaaagtggtttaccctcattttcattaccaccctctcctggtttctcctctacttctttggattttcatttttagtcaactttgttggttgatcttcttccgctgcccaaatcttaatcctaaacattttaactttgtccccttgccgtttctctactccctcctttcctcctccctcatcaggtgagttcatctgctccaaggctttggttccaaaagccaaactccagtggtcacctcctagtcaagtgctctgttttgaagtgtatacccctccacccagattcctcacagacatctccctctgaatttctcataaccagcttacattggacaggccccagacagagcttgcaactttccccttcaagctatgcttcctttagtcctcactttctccattttcatctccagcactgggcacagtatcttagattccaatcaatgttgtttaatgaataagcgagtgcacctaacactgcatgtttattgttgacactgctcaatcagcattttttgtcacccatactatattcaaagcaaactgtaatgattcttaatgtgtgctgtctgattttgtaatctcctttgcactacatccagaagccaattttgctaaatgttgcagttttttggttgatgtggccagaaagccagagaacagctaggtgagctttgtaatttataaccaattcccttttgagtcatgaagcttagcttttgccagaattttttttttcttatgcttggaagaacaaagtgaactgatttaagattttcttcctgtggccaggcacactggctcacacttgtaatcccagcgctttgggaagccaatgggggaggattgcttgaggctaagagttcacgaccagcctgggcaacatatcaagacacctatctctacaaaaattttttttttaaatagccaggtatggtgacatgcgcctgtagtcccagctactcagaagactgaggcaggaggattgcttgagtcctggaagtcaaggctgcagtgagctgtgatcatgtcactgcactccaaccttggcaacagagcaagacttggtctttaagaaaaaaaaaaaaaggattttatctatttgtgtttttttatattggagaagcagcttaaacctggactagcaccataggagaagaggttcccttaatccactactgggtcaatagttacggaaaaatacaagaaatgactatgatacaggttctaaaataccacttatgctacttttaactcattataaatactgggagcacgaaaacatgcaccagagaatacaaaccagaaaataatttggggcctggtgtggtgtctcacgcctgtaatctcagcactttgggaggcagaggtgggcagatcacttgacgtcaggagtttgagacgagcctggccagcatggtgaaaccccatctctactaaaaatccaaaaaaattagctgagtgtggtggcacacacctgtaatctcagctacttgggaggccgagtagtgagaatcacttgaacctgggaggcggaggttgcagtgagccgagatagcgccactgcactctagcctgggcaacagagcaagagtccaactcaaaatagtaaccataataatttaaaaatagaatatgcagttttatatagatgtgatcacatgtacactcagcaacgggtctggagaagaagcctaacaacacatttagttccctctgcttgaatcccccttcagtggagagagaggtgaggtgtaaatgtttaacagctggcctgcttgagggaaaaatggcctgatttgaagtgcttatcagtttccatggtgtgaatacccccattactgctctcaagtgaccaacatgacagcactgaacagagttaggaagggatgggttgtagcgtatcattatataatatttccaccagccagatagagtggatgtaaatgacctcgagcacacagacggtagtaaaatgtagtgaaacaaataaaaagttatgaatttggagtatttataagctttgttttaatataatttatttaagtttatataatttaatttttagtagtggccggatttaacaatgactcacaaaattcctgaatatttaacagttggggtgagccaacttcagcacaccactggagagcacccatagggtgaattggtaaattctgttcttttcaacaaatgtgtaccgatgataacaaagtagcatgggccttatttaagcaagcctaggttcagctccttggtctcctaccagccactgacatagagcaagatatttgacctctctgaacctgagttttctcaccccaaaaattaggaatcaatctttacaggattattttgaggattaaatgagataaagtatgtcaaaagctaggagcgtagtggtacttacagctttttcagtcttccttggggaggatttgtaaactcattattctcgattattttaattgcttactctttttcctcaggaaggtctccaaaccctacaggacaaataagactcctatctttctattttcttgctagttacaagctgtttctttatctgtgctgttatgatatagggaaaaagtgaaaatctactgaactaaggtgatggagagaagtcatagacaaataacaatagagtattccttgtgatatcaggcagaatcaatgttggaaaagcattgagatttaaagagggcttgataactcttgttttggtgtttgcagaaaatttttcttatggctttatgaaaatatcttattttgaaagataacaatcaactgtgtctttacggttgaatattacaattacaaaagcataattattccttattttgttatatttcctaacatcagaaatagatggattgatttttaaagaaaaagaatcagattcaatttagtctcactactcactcctttcttttcttaaaagccaatttggtatataggtgaatcttaatgtttttacaaatatattgattattttgtagaaaataagatctcatgaaataaatctcttctgacttgacaagatgacatggtatcccttcatttgtttccacaaaaattattcatttaaaaggtgagccccagttaaggattttctttttgttttagtaaggaactgaaaaatcaagagaatgtgcctgtgaaatgcacacaaagttgcttctatatgtgatataatacttaggacacctgagcttgattatatactaatgtactatgctattgattgattagtcagggccatgaattattatacttgaattactgtttgcaaggctttttaactatcttagaaaacaaactaacagtttgagaaaaagctttaacaataaatgggtgccaaaaggacgtaattcaccatctaagcagtttggtttggagaaaaaaatatattaacttcatctagtccttggggctttgtggcaataaatattgatttgatatgaaaaatagctatctactgtacttaatagtattaaggatactttacctgttaaaaagagggaaaatgcaacaaaatatgagctccagggttatgctggtgagcagatccattgtatgttaatagttttatttataaaacaccactctctatcgattttttttaaagcaggcataaagttgctgagaaagcatttcacacatgttcccattggttttcttttcacccctgatactggttgtttcgtaatactgaggaaaaagtgaaggattctagcaatgttggttttcttttttttttttttttttgtttggattggttcggtttgattttgctcatattttttttttttaaagtgcacacctgcactccttcaaagaggttaccctttttagaacatacaactttctccccacagtgcctcagtaccgagccccattttcggtggacagcaatttgtctgtggtgtgtgtgaactggagtgacaccttcctcctgaacggccaactgaaggagtacgtgttaaccgacggagggcgacgcgtgtacagcggcttggacaccaccctctacataccgagaacggcggacaaaagttagtttctgactcctgtttctcagtgtggaaggcgctctgttccccagctttacgggatgctaaatctgaaagctgaccagcagatgctcaccattaaaatgtcttggtttaagtgcccccttcttgtgaaaaagttactgctcaggataaataaggttttctttccttcccatttgcagcttgacagcactgcagttataatgcagttcaaggggacagcgctgcctccacaggactggagggtccccaggaagggataagacccaagggccagttgggttcacaaaagaaatagcacccatacatagtcaatgactaccctaaaataatacacttctagcaacttcatagattttcttgctgtatctccagtctccaaacagagccctatcaggaaataactatctccaactcatgaggacctgaataaggggtttccttaaccttccttgatatcagcccctgaaagaacaatcttgaccctctaaaatggagttccttcttcctgtttacttacatgtcccttttctccttgccttgtttttaaattgaaatgagaaaatgctttacaaggtgctaagtattttatagtgatcagcatgctcacaggaccaatgttcactatataatgaattgattaatgagtattttattttggctgtaaggtagaggtaaacagtgagctccagcattgcatgtatagtaatagaaacttaataacatttttacaaagattcagctacacatgttcattgttacagttcatggtcacctgggcagctctttgggaaaggaaggtggcctgatggttgggagacacaggttctacctggccaggcctataaccatctgtgtgaccttgcaagggtcacttccctcaggttcctggccattggaagagcaatttagaccatgtgatttctaggatcccttttgagctctcctgttcagtaagaaactctaggtcatttagtggaaagtacacctgtaaattttaaaggaaggatttaaaccgtgtgcagaacaagatgcgctttgtgtattaccctttactcgtctgatgttcttttcctttgctgtataagctctaattttccttagctctattacttatggataggctattattacactaatgatagctttttttcttaaacattttaaaattagaagtaattttgaatattatataaaacgtcataacttgctttggaatcctatttttcatgctatgatgcattgctcttttaaaagcatgtgccctatttgtaggtgttgaatgaacaagtcatttaccagttcttccttttgtctagccttctttttccaggtcatctgcacgactgacgaaggaagtgttaagacgccgttgatccaatatgatacctctactggacttggtaaacaactcatattatacttggcgtagcacctattcatcttcctcaagaaacacacatatgtttgtttatacatacttggagtcctaatatattagcatagactatacagaagaaattgtgccaagtgttgtcagagtttttttttttgttttttttttgttgttgtttttttttgagacggagtcttgctctgtcactcaggctggagtgcagtggtgcaatcttggctcactgaaacctccacctcctgggttcaagcgattctcctgcctcagcctcccgagtagctgggattacaggcacgggccaccacacctggctaactttttgtatttttagtagagacatggtttcaccttgttagccaggctggtctggatctcctgacctcgtgatctgcctgccttggcctcccaaagtgctaggattacaggcatgagccactgtgcccagccagaaattttttaaaaagtcctcatggaacttatatcaggcaaggagttacaatacactctttttttttttttttttttgagacagagtcttactctgttgcccaggctggagtgcagtggtgcaatctcagctcactgcagcctctagctccaggttcaagcgattctcctgcctcagcctcctgagtagctgggactacaagtgtatgtcaccacgcctggctgattcttgtatttacagtagagatggggtttcactttgttggccagggaggtctcgaactcctgaccacaggtgatccacccaccttggcctcccaaagtgttggaattacaggcgtgagccactgcacctggccagaatgtactcttaaaatgccaaatattgaattgtaaatatggaaaagaccagagagctcaaactaaatttttctcctaaccacaaaccctgtcaataaagaattgtatgacttcgcgtgcataaaggtgatttacagaggaagttagaggagagatcagaagaagaaagaaaatattcagccaattcatgttgatcataatgttaatattctagattcaaagcctagaatgataaatttggaaagtgtcttttattctccataaaagattatgattgactgttgatatcgggtaatttagctcaacgggtacaattttaatttttaaggagcatcttttaaactgagttttactcatagtctctgaatctaaatttgtgatactttataaaagcaaattagagaaatgccaaatcttttccactaaaacagattcgggattgatatcctattttaaattccagtaattaatgatatatcaaatttgcatgtatagagtttttttttgaaaaataaacatgtccaaaatttctgaaacacaatttaaaaaaaaaattttttttaatttttttgagacagagtctcatacatgatgaaacatgtatattattgtcaaggatagtttcaatttgtaaaaataacgtattattctatgtttccaaactttacatgtctggatgtcatataaaatttcctacaacacttaattcttctcatacggcttatttcatttaatagcagtggtaggatagaacagatctcatttagtattctgttagcaactccaatatttccccaagtggacaagtggaggtataagggacacaggaatttatccaggaatgctctgctagcttgttactgggatgagaacaccaacacagattttctattgacttctggcctgggactttttctttgcaatggtttgccaagttaagtacgcataggaatcacctcatgtgcttgtttattgtagtttcccgggcctctggcagagattcagactcaaggaggctcagaatctgctctttaaataagtcctgtccagtgattctgacacagggctcagaaccacgtgttgagtgatgccggaaaaccaaggttgctcgccttctaagccctgccagtctagtttccttggtgaatgggaagtgtgttgttcctggaggcaggccatcaacagagacggatttactctgacactggctgtggtttcggttttctttggatctgaggcccagccaccagagtttcaaaccctgacagtgaacctcccatgtgatgcacaggtagagtcccttaaggtgaaggggtacttcaaaaagacagaagggaagggataaagggacaccatcctgatctcgaggtcttcataaaaaggagaaatcccccgttggctcatgaatacgaattgaggtttccactgtgtctggaggccgggctttgggtagagcagaggggaagaactctgaggattgtgcaatgctctggcagattccaagatgtgctgcccaactaatatccatcgtcagttctaattttcatgatgtaacttttttaaaaacattcctgttcccttgcctgaaggcagcctccaagcaggagagtggcagagacctcattttcctctgactgttctaagggctatttcccttttgaggcttccctcgggcaggctgccctcccttcccctgcgtgctgtggagcaaggggcccactgggcccatcagatcagtttctggagttacagccaacaagttgttttctctctgtgccacacacagaggaaacaactcttttagtgtgcaacctaggctggtttgtttttaatcaaacaacacacattggttcctaattaggggaatttcgacctgctggagcttgattggagtgttgactcaaccctttattttagagatgagaagcaaaggtcagagtccaacatttaatcacagagctgatcggcagcagagttagggttggcaaagtaatatccctcctcttacggagttcaaagtttagttttagtcaccatctgttcctgcctttaatagtttcaccccagttctgaacttttttcctttaagtctttccctgctagtgtgagtgtgaagtaccacgcaggcccatggagttctagaggtgttgaaaagggggagatttgtccagtgagtgagtgggctttgcagttgtgtctgcttgttcttctgacctggctgtgggtattagatttagatgagcagctctctggctcacatctccacaccagcctgtgtggccgctgcatcagatccacaggtttctgtgctggccccagcagtggctggatgggagcagatctctggccaccccacccccacccctgccgcacccctgcttagcttgccaagctgacaacataatttcactgccttcgcctatcctgcatgattcttgtcagcctctctcctatcttccccacaagacttaataaacctgcctggctgggtgcggcggctcatgcctgtaatcccagcatgttggaaggccgaggcaggcggatcatgaggtcgtgagattgagaccatcctggccaacatggtgaaaccccatctctactaaaaatacaaaaattagccaggcatagtggcgcacacctgtaatcccagctacttgggaggctgaggcaggagaatcacttgaacccaagaggcagaggttgcagtgagcggagatcacaccactgcactccaacctgggtgacagagcaagactccatctcaaaaaataaataaataaataaataaataaataaataaataaaaataatcctacccacccttcatccctgtaaagctctaagcataggacctggcaccaggtacattcttgttaaatgtgagctacttttattaatactaacttcatgtgcagagactcacaccaactgaactctcaatgtgtgaacgccaagcaaaggtaagtggctccagtgctaaaagatttctttccataggaagctttcccagtgcatttgggtgatggtttgctgagctttgctctttaacagagaggccatgtaaagacaacatggtagcaaacacaggctgttaatatcataatggaaaatggaatctgatgcttcaaaatccagtttgcacgaagtatcaggaattggactgttgcatgaagcaagtacacctcagatctccaaggagtgattttgtttgtgactctgcagcaataatagtaagggtcccagtccctcatgagaatccaagcaaggactttgctcccaagacacacagctatgaaacaggtgaccctcaaggttactttggtaacctcttttaaaaattgctccccacactcccatctttcccagggatttgtcaagacagtggtgatttccaacctgagcagcagcgccagaagtgtcagcaaggcctctcaagggctgtaagcatctcgttataacccagcaacctgctgaaccattaccccaggctgcacacaagtgcaaacaagcagtaagagacaaactgctttctgctttcaactcctctctaatttactatcaaatagcagggccagagatgacaaaaatgctttctgaaataacatttcccctttctttctctgggttttgcaggcttggtcctaacaactcctgggaaaaagaagggatcgcggagcaaaagcacagagttctacagcgagctgtggttcatagtgttaatggcgatgctgggcttgatcttgttggccatttttctgtccctgatactacaaagaaaaatccacaaagagccatatatcagagaaagacctcccttggtacctcttcagaagaggatgtctccattgaatgtttacccaccgggggaaaaccatatggtatgtttgtagaggtgtggccccatttccctatcactggactagaatacttgttttccttctgagaaaaatgtgtcatagccatggtaacaaggaattagatgtaagttatgtttcactaagtgtggggaccaagagaggctaaccctagaacagctttctcaactttggctgcacattagaatcacctggaaagctttaaaaaatatcactgcctggacttcatccgagaaattctcatatccttggtcttgagtagggcctgaagattggtattcttttcttcactccaaaactgattttaatgtgtaactagggatgagtatctctgccctgtaattgtaagccagggcctggtggagaagagttgtatgttgagattacctggggaaattataggttgtattactgtgtaatttggtggcggggaatgaacattaaaaggcggagatggggaggaaggggctacagtgctagtggtgctcggtctgtcctctggtcctgacaccctgtgccacagaggatggatggctcctcttagctatagaccactcactcccaaaataggaggtccagtaaaggtctagtgggagagggccccatcacttggtattacaggacagtcattgcccagagcactcattgaagggtaaaaggtgatttaattccatggtgcagtctggtgtggggctatgtctacctggaggaggaaaggctgcgttttctaatcctcatcaggtacccatctgttcaccaaagctgggcgcccacagggctacgtctccctgaggaggtgccttttttccagtttgcactaaggttctatattagctagtggctaccctaggcagtactaaaattaagcacagaagcctggtcaagctgcttacacttcaacatttaaaaaaacagcagtgagtgaacacagcagcaccatctgccttccagatctcttcacttttccagcactcagcaatgaatgaccactggttaagccccaacatagctggatcagacctaagtagcaggagtgttgggagcacaaaagggcagtgggccctccgaggtccacggtttgtggtttttgtgggaagtagcaatgggacaatgacgtggtggtggagaagcaaagaaggcactgcccaacaccatcagggccttggctctctactcacatctgtcccactcctctactcactcatcctcctcggagcctccttcctccctgagcccatcagacaagctctaaccacagggccattactgctgctgctccttgggtggctcacactcttgcttcattcacatctctgcacaaatgtcacctcccattctatgtaaaatttcctagccccttaacccacttcttttcttttctatagcatttaccacataacactaagtcagatatgtttgtctgactcctgaaatagaaggtaagctcccaggatcaatgatcttgtgggcctcttcctgttgtatgtgccccgggacccagaacggtgcctggcatatcataggcactccacgaatgtttgttgaatgaatgaatgtcgagtgatcacttcgaaccatgggctgtttgctcctgttcagtgaatagtcattaggagattctcactgaagagcagatatttcaaaatttttccttgttaaagaataactttctttaaggagcccatgttcctagaaggtgcactgctgctggaggaaggcagtggaagagagaaaagaaggcaggagagatctgtttagcctgggagatgagctaaactgaaactagggtctatggagtgcatggagtggtgaaagggaggttcccaagcactgctaggcacatctactgtataatgtgaggtgcggttacaggaaagtgtacccacataccagcaatgtccagaagtcatttcagtgatactttctcctgtcctttgacccagtccctataggcaggcacctctgtgtcagaatcctccatgaggaagaacactgtcttccttacttggttaacttagtgaccagaagacactcccatcattcttgtggagatgttatgttactctggatataaccccattgctcagggttttaatgagtcttgttaagcttcgttttgtcaaagtgaggaccatgaactatctgcatcagcatcacataggaggagcaggacctgaagttctgagggagaaactcaataatctgccattttaaccagaacctcaagaagtctgggccaggctcggtggctcacacctgtaatcccagcactttgggaggttgaggcaggagaatggtgtgaacccaggaggcagagcttgcagtgaaccgagatcacgccactgtactccagcctggacaacagagcgagactccgtcacaaaacaaaacaaaacaaaacaaaacaaaaaaagaagtctgatgcacagcaagatttgagaacagctgaaaatgaaataataatataatacaaaacctgtatgcagtgtactgtttgataaccagtagaaacaggtggtgggagggtgctggttagaccttgctgtcctgacaccacacaggctaagccgcctctggggacagacttaggcttcagctgagaaaagcggacaaaagaatgtaaacaccctgttcctgcacaccctttaccatcggggaaatgcacagtggcacccaactgattctttcactgagtggccaagactgagtcaggtgtgaggatgggaaggcatagagggactggctggctgccaggggctctgggcccagggaactggctcatcctcagcagggaagccattcattgcaggcaggtctcagcagaagtgaaatctgggatacaccagggcaccgggtggaattcccctgagcctgttgaatcataatttaatcctatccagttgacagtgtatttgcaagtcttcttctgttgctttttacaaatatttttaaaccaaactgctctcacaaagttggagaccatgagagacattgtcaaaaattagccaaactaaagagagtacaatttgtattagtagagcaaaatgaagtccctgttggtgactgtgggctcctcatctactcaggtgggaaagaatccagtcaaggggaagaatctgaataggaacaagccagattcacctgctcagttttccagattgactgtcttttcacttgagtaggtcaatgagctatgcccctgcaacacccacccacacacacacacacacacacttctccccctcatgtgacaagctctggtttcagtgctgctgtgaccctcttccaagcacccgtcttgtgaacaggtaagataccctttgaacatcagacccaaactggcaaaaggattttaggctatactctgaatggagagaaataggcagaggtgccaaggaatgagagtgtcttttgtatttcatcaacatttttcaagaccatacagtatacagtatagctaagtttaagttttgcttgttatttaattactggtttgaagatcctttcattccctgcaatactaaacaaatactggcagtggtacttaccttagacactaatcaattaatttccactcaccaaggtttttttttttttaatttgtttgtttttgagacagagtcttctgtcatccagactggagtgcagtggcatgatctcgactcactgcaacctccagctcctgggttcaagcgattctcctgcctcagcctcctgagtaactgggactacaggcgcccgccaccatgcctggctaatttttgtatttttagtagagacggggtttcaccatgttggccaggttggtctcgaactcctgacctcaaatgatccacccgtcttggcctcccaaattgctgggattacaggcatgagccaccgcacccggcctcactatgaagttttagttgcaaaacccaactttctctctctcatatatatatatatatatatatatatatatatatatatatatatacacacacacatacacatacatatatattcacatatatatgtatatatacacacacacatatatatacacacacatatatacatatgcaggtatgtatcctaggatatatatgtacatcagagcagtattaaatatgggtatgataatgctgtcattggagaaatgcaaggaatgtgtttaaaactgttccaaacatggactgatgctgccatttgttctcagtttgactctgtggctgatatatctgatgtgtcaagcaatgtcaccctaaaaagttacaccatgcactttgaggtacctctgtgtgctgcatgaatgcatgatcttttgcatggtgtgttgactgcacagtgaaaagcaggaacagatcattgatgacttccatatatccattccttggaaagctgaacaacatgagtgaaaactctactgaaaaaagaaaagaaatgggaggccgaggcgggcggatcacaaggtcaggagatcgagaccatcctggctaacacggtgaaaccccgtctctactaaaaataccaaaaattagccgggcatggtggcgggcgcctgtagtcccagctactcgggaggctgaggcaggagaatggcgtgaacccgggaggcggagcttgcagtgagccgagattgcaccactgcactccagcctgggcgaaagagcaaaactctgtctcaaaaaaaaaaaaaaaaaaaagaaaagaaaagaaaaagcagaaacatttcattgattggaccagctaaatcagagccctcagatatttagagcaactatagtttatcttacggcgcgttctaggtctaaattatgtagtgactttttctctctgatgttaatatcagacctgatgtaatttggaggctggaatcctataagaaatggaggaatatggaatgagaaatgagggagggaggagtcaatttccctacacaaatccaggacttttaaagtgaaagacaaacggagctcacatagtggaccaccatgaaataatattgttatctttggctgttctgggggaggagtgttctcaagagggaggctctgtgctgacatgtatgaagaagataccttgttcacccatcatccgtctgccttgccccaccactttgcaatgcagcaagcccttgccccacagggaacaacagccagagcaccagtgcatgagctctctaggtgccgaaaacactggccacctaacttgagtattagctcatcatctcatccttcttaccaagaaacccagggtcaccgtgttgtgggtgctcatagctgctaaattctgtaggtgacagttgttcccttcattgacaatgtgacaattgtcaggagacagtcattcccttcactgacaatgtgtgagacacaattctctgtcatatttcaagcccatattctttatatgtgaaatactcacagcaacttccttctcaggggttagccgataccaaaattccccggtctgggacacctgtgagtatccgcagcaaccggagtgcatgtgtcctgcgcatcccgagtcaaaaccaaaccagcctaacctactcccagggttctcttcaccgcagcgtcagccagctcatggacattcaagacaagaaagtcttgatggacaactcactgtgggaagccatcatgggccacaacagtggactggtgagttggtttcctcatacagggcctttgctaaatatcccagaaaaaatattggtacagagctgcctgtacttcaccgaatgctgccccatggcactcgcctctgagcacttagccagtgaggtagtaacaaccggtttactaatgttacttcagttgtttgataagcagggtagaaactttgtcttgttcttctggtatgcaatagatgcttaaaaataaatgcttattggctagccgtggtggctcatgcctgtaatcccagcacttggggaggccgaggtgggcggatcacctgaggacaggagtttgagaccagcctggccaacatggtgaaaccctgtctgtactaaaaatacaaaaattagccaggtgtggtggtgggcacctgtaatcccagctactaggggggctgaggcaggagaattgcttgaacccaggaggtggaggttgcagtgagccgagaccgcgccactgcactccagcctgggtgacagagactccatctcaaaataaataaataaataagcagcaaacaggttatacttcatatacttggagcagatgacaggaaacattggaatgggcctaaaacaaggcataaaatacaagcacttgttttactaaaacaaaaaggtactttttttgttttgccttttcctattggtgtatgggtagacgcaaaaagaatattttgtatcaacaggtgaacatggttgctttccaaaaccttaggaaatgatgacaaatgagggtgttactatttataagcttcatctttcataatttcagtccagtgggtacaaatcattggctctttgaaaggtaacctcttcgtgatataacatttattatcagtctctgagcggctacaataacaaaaatcctagaatttttgccaactatcaaatttcattgtgctaacttcctagatgcccgctgcagtacctaccattccactgggcctgttagaaaataaacagataggccaggcacagtggcttacgcctgtaatcccagcattttgggaggccgaggtgggcggatcacgaggtccagagttagatagagaccagcctgaccaacatggtgaaacctcgtctctaccaaaaatacaaaaattagctgggcgcggtggtgcgcacctgtaatcccagctactcaggaggctgaggcaggagaattgcttgaacctgggaggtggaagttgcagtgagctgagatggccccactgcactccagcctgggtgacagagcaagactctgaaaaaagaaaaaaaggaaaaaaggaaggaaggaaggaaggaaagaaggaaggaaggaaggaaagaaggaaggaaggaaggaaggaaggaaggaaggaaggaaggaaggaaggaaggaaggaaggaaggaaggaaggaaggaaggaaggaaggaaggaaggaaagaaggaagggagggagggagggagagaaagaaaagaaaagaaacataaccagctaggaagttagctcctgtgtttactcctctggggtaaaattattcacctccacttctttcaatcatctgcttctgtttttggatttgctctcatctttctcctccaagttctcacttttccttcactgaaaagttgatgacttccatgaagcctttcttgactaatagcaaataataaagggagttcgctggacccaggttccctaacactatataaaaaaatgtaccatccttctggcctgttcagaatgattgtataatatatacatatatataatatgcattttaaaatcacaggctgtttgatgttgttgtaacctcaactacatgagtccatttcagatctaaagtttttaaaaggcagggataattatatttggttgaaacaatgaattgctaactgatcatttttgacatgcaaaacagcaattgctatacattcaacataatacattgaaagttcagatgaattattacatctaatcttcacaaactgtaggaagtaggttctattatcatcctcattttttacaaaaagaactgaggtttagagagatgagtgatttaatgagagattacacagctagcaattatttttatgggtttgggttcttaaaaacatcatctgactacagagctcctatttgtaactattatactgtattgtcatttttgcttgctttttacggtactaataatgggcaatgtgcaaagggactcaataacaagcttttgaaggtgccagtacttggcaagttatctgtttattataacattataaccaacattactaaccctatttgataaatacaaaatacagcacaagagtgggaagaaatggagcacaaatagctagcattctgcctcttccatttaccgtttgaactaaatccatatatatgtgtgtatatatatgtatatatacagatcaccagaggtcaggagttcaagaccagactggccaacatggtgaaaccccatctctactaaaaatactatatacatacatacatacatacatatatatatatagtgtatatatacactaaaatatatagtatatatatgtagtgtctatatagtgtgtatatatatactaaaaatatatatatatacccccagctaatttatttttatcaagtatatatgtacacacacacacatcccactctacagatgagtagactgaggcttctgaggcttaggttaaaatatgacacaatataaccctcaaatcacatatacattttgaattagtctatagttcatgtgtgcatgtgatgtgatcctttcaataagagaaatttaaggcaaggtctgttttagaccccaccatggtgttgagaataaaaaagcctttaatacttattactttttacacttaattgatataactataaattgatagcaaatactattgatagcaagtatgtagccaatgatgattggcttatttttcagtatgtggatgaagaggacctgatgaacgccatcaaggatttcagctcagtgactaaggaacgcaccacattcacagacacccacctgtaaaggatggaaacccagaagacgtaaccctggaatgcaaggtctgcacccatttcctcctgggttatcactcacacatcataaatgctgaaaagccattgtttattatcctataattctttaaagaaatgatgactgtttttgaaagtgttccttcctaatagaggtctaagaaatgatatttttctcatcttaaatgagagagaatattcatatgaaaatacttgatttgctcttattttgtagaagacaaagaagtatgtaattgtcacttggttctgtttggcagtgatgctcctggttaactgaataatcagtggcaatttcaagatggctcacagttgttagaagtagtaagttagttactggctcaaaaatgattctgttgaaaggatgtcactgctgttcatttctatctgccatttctgtcagggttgacacaatcctgcaagaatagttattctaatgatcacagctgctaaatgaatcccaaactttgcaccaggtcgacaaacttttctgaaggttctatttatttaccatacatagggttacttaccaaactttttgacaaggctgaaggttctatttatttacaatacatagggttactcaccaaactttttgacaaggcaacacataacttacacataaatgtctctgttcttgcatttatgaattttccaaaaatctaaggagtaaacagcttatttatacattttgaggagaaaacaaagtgtttcactaggaacacctctacttgaaccaatgtttttatttcatatattttatagttttgaaactagtttctcataaaattctgtcaattcactgaatatcagagaatactgacatcttcaacctagcacatttcaaatggaaactactgttctatttgcaatattaggctgcgtgaaattttaaaaggaaaaatgtatctgttccttctagcattaacatatatacatgtagagacaagactatacctatgtgtatatatatgtatatcatgtatatattactctgcactatatcccttctttttggagaactagccattattttagccacagaatcagtaagaacagatgatatgcaacagtaccaattacggttcaaaaatgtctgtcacctgctctagttggattacaaagtcattggtgaaagtcctatggcaagaaaaattttcttgcaaatcatccacataaaatcagatatttaaatttgttcttcatggaaaacagagtaagaaaacctcttgtcttccttcatccttaaaggtctttgtgaccccaggaaaatattgactctgtctaacacacaatagtcacaatactttttgtgaatctacaaccagagacaggcaaaaacttgtaaagtaagggatagtcttacttattctgcctgaaaacaatgtattaccccagggcccaacagtaaaagattgtggactttttgggtattgagatttcatctagctctgtgagagagcagctcctcagactgaccaactcctagacaaagtttgccaaccataagtgtcaaaagcacaggccagtattaagcagaagttctaccaccttattagaactgctataaacaaaagcatctgaaataattgtgcacatctggcagtgactgtagaaaatacgaaatatatatttctcgccaagtttttatactttctgaaatgaaaacataggattgactagtttactggtttttattcccatatgccgattctgggacaataaagttgtttaaagctggcacaaataagcattaaccaaggctgtgtccaccttctgtgagctacttaaggtatataggaaaggagtggtcacaaacttgcatcctaatccttggtggactcttctaagaatacagtttgctagtcacaaagaatagtctacaaatatgctttgctaggttcagaagattgagtttatcctgatttttgaaaaattaaccaggtatctttatcactgtgtatttttccaagcacagtataaaattttaacaacgcacaaaaaaatacagaactgcaggggattttatcttggatcattatccatttaatcatctaattagacatgaactcagttagctgaatcatttacattttgactccatagcttagggcagacagaagcctgtatggcttctgcccagaactctgtcccctgctacatgtctaagtttacttgtatttatttcagagaagaactctaagatgttgctttgctactttaagtggtattgcgtgccaagcctctattatacaaaccatgcagactcgcctctagagattctgattcggttgatctggggtgtgtggctgaggcatcagtactttttaaagcttccaggtgttctaatgttgagacccactgatgttccacaatctggaagaaatcatgtacaggaataatatgctatgcacagggactatgctccttggctcaccccttctcccttataaacaatgagcagttcttgatgaacctctttaaatttaaatctcctgactcacattttaccaattgtacatgccacattctcagcttacgaactaccatgttttgttattcttaatatcaactgtttggtaagagtacagttgtttttatacactctaagaaatgtgtttataatctactgtaatttccactaaatggaacccaaatattaatgttatggtaccatatactgatgtaaaaatcatgctggcatccatgaacacaccggtaaataaaacatagtccaagtggaagaattcattaataaggaacttttaattatgtcacaaatgaatagttggtttccaatgcacaaatatcatgtaaactaatctaaagatggtttgcttaataaatatttgaatgtgacctaattctggcttaatcatctatttattattaaaaaataatactcttaacagctctgagttacacataaatgatgataaagctatacctatttaagaaagtaagtaggatgttctggataatttctcaaccaacaatgtacattattagaatgaaaactgttttatttttttttccaaaatatactattattatgtctcaaccagcagagattcaaattcagcaggactggagtgggagtgaggcctgggcaaccatgtgtctaacctcagccatttctgatacataagcctgcataagagccaggaacaggaccatagactcttgaaatagaaagatttgggttcagaagttggctcagtaggtaataagccttgtcactaagttagttatttaacccctgtgggtctcagtgatcccatctgtgaaatgaggataacaacaacacttacttacttaccctattggtatgaaaatacttctttccatgaaaataattacaattgttttcatttttcatcatcaatcacacaaagtacacagactcatttcaattttttttcttcccaccacagcgaccctaatgaggtaggtataatgaaaaaattaaggcataatgggggcaatctgagaaattagtgtcagagtagacagacataaaccactgcatcaaggttcaatctcctgtaagcaaaagaaagaaacgatttgacttgtactgtaatgcaatctagtatagtcagtttcctttttatgcgattctattacataatagttactatcttctttttaatggccttttattcctggtcactagagtctagttttttctttcattttcttacttgcccacccaactttcacataactgtcataaagaggaagaagggtgtaagataattacaatcttagtaattttgaaattatgctttgcctaatattttctttcattgataataacttattttccacatatattaagttctccctccccccattttttttaaattatgggaagaagcaaagaaatgaacaaacatatatagcacactttaaacagaactgttacttaaataactgaaaacgcattgacataatcatttttatttgatttaattgataaataaatacaagagaactgttgtgaaaccactggcaatatagtaaattttaaagattttatttcaacttcactcacttatatttcttggaatggggatatatacattattcaccaataaatgctaatgctttaaatttacaattaccctatttgtagaaacctgaagatcattccaattaaatgaaaaaaaattgtacaaaaacgttcttttgctcttacaattcaaaatacattcaaattcacattcttacagcagccaaaacctttaacccaaaattcagaactgcagtcctacaagtgaacaaactagtgttttaatttaattatcatgattgttgttaacactgaaaaaaaaacatggtggctcctgaaacaagacaggttagcaactggtacagctttcccttctgggcactcaaagctttgcccttgattattatttttatttcatcttttcaaacacagacaattgctccaacttgaaagtttcaatggaattttggcatttaatattgctaatgcttgctaagatttaagatctcccaatgatgagaatcagaaaatgacgcacgactaaattaaaatcatcctaaaagacttactacatagtggtatctggtattcaatatcaatagtgtttttgaattacatgatatgtttttcacaaacatagcacctcatcaaatatctggtaaacactttgcaatcacaataagtgttgggagaccaagttccaaagacaattatgtgattcacttaaaggtaacattgtaagacaagtctcaggcataatgaagattaggaatgcagtctgctggttcccatgatctaaagggatgctcacctatatgggcaccatcctattaagacgtggtaata

What is claimed is:

1. A method of integrating a transgene into the USH2A gene, the method comprising:
a. administering a rare-cutting endonuclease or transposase targeted to a site within the USH2A gene, and
b. administering a transgene, wherein the transgene comprises at least one component selected from a promoter, 2A sequence, or internal ribosome entry sequence, wherein the at least one component is operably linked to a partial USH2A coding sequence,
wherein the transgene is integrated within the USH2A gene.

2. The method of claim 1, wherein the transposase comprises a Cas12k or Cas6 protein.

3. The method of claim 2, wherein the transposase comprises Cas12k from Scytonema hofmanni or Anabaena cylindrica.

4. The method of claim 1, wherein the rare-cutting endonuclease is selected from a CRISPR nuclease, CRISPR nickase, TAL effector nuclease, TAL effector nickase, zinc-finger nuclease, zinc-finger nickase, or meganuclease.

5. The method of claim 1, wherein the USH2A gene comprises a mutation that causes retinitis pigmentosa.

6. The method of claim 1, wherein the transgene comprises a partial USH2A coding sequence from a functional USH2A gene operably linked to a splice donor.

7. The method of claim 6, wherein the partial coding sequence encodes a peptide produced by exon 2 of a functional USH2A gene.

8. The method of claim 7, wherein the partial coding sequence encodes a peptide as shown in SEQ ID NO:55.

9. The method of claim 7, wherein the transgene is integrated in the USH2A gene within exon 13, within exon 21, or in a region between exon 13 and exon 21.

10. The method of claim 6, wherein the partial coding sequence encodes a peptide produced by exons 2-13 of a functional USH2A gene.

11. The method of claim 10, wherein the partial coding sequence encodes a peptide as shown in SEQ ID NO:13.

12. The method of claim 10, wherein the transgene is integrated within exon 13 or intron 13 of the USH2A gene.

13. The method of claim 6, wherein the partial coding sequence encodes a peptide produced by exons 2-21 of a functional USH2A gene.

14. The method of claim 13, wherein the partial coding sequence encodes a peptide as shown in SEQ ID NO:57.

15. The method of claim 13, wherein the transgene is integrated at the junction of exon 21 and intron 21 of the USH2A gene.

16. The method of claim 1, wherein the transgene comprises at least one of a left and right homology arm, a transposon left end and right end, or one or more rare-cutting endonuclease target sites.

17. The method of claim 1, wherein the transgene is administered to a cell within the retina.

18. The method of claim 1, wherein the transgene is harbored on an adeno-associated virus vector.

19. The method of claim 1, wherein the transgene is administered with lipid nanoparticles.

20. The method of claim 1, wherein the transgene is administered through electroporation.

21. The method of claim 1, wherein the promoter is a tissue specific promoter, inducible promoter, an USH2A promoter, or constitutive promoter.

22. A method of integrating a transgene into the USH2A gene, the method comprising:
a. administering a rare-cutting endonuclease or transposase targeted to a site within the USH2A gene, and
b. administering a transgene, wherein the transgene comprises a partial USH2A coding sequence operably linked to a terminator.
wherein the transgene is integrated within the USH2A gene.
